(19) United States
(12) Patent Application Publication
(10) Pub. No.: US 2025/0146087 A1
(43) Pub. Date: May 8, 2025

(54) TUMOR MICROBIOME ANALYSIS AS A PROGNOSTIC INDICATOR OF PROSTATE CANCER

(71) Applicant: UEA ENTERPRISES LIMITED, Norwich Norfolk (GB)

(72) Inventors: Colin Stephen Cooper, Norwich Norfolk (GB); Daniel Simon Brewer, Norwich Norfolk (GB); Rachel Hurst, Norwich Norfolk (GB); Abraham Farag Salah Gihawi, Norwich Norfolk (GB); Justin Joseph O'Grady, Norwich Norfolk (GB); John Richard Wain, Norwich Norfolk (GB); Emma Jane Meader, Norwich Norfolk (GB); Ghanasyam Rallapalli, Norwich Norfolk (GB)

(21) Appl. No.: 18/730,566

(22) PCT Filed: Jan. 18, 2023
(86) PCT No.: PCT/EP2023/051155

§ 371 Date: Jul. 19, 2024

(30) Foreign Application Priority Data
Jan. 19, 2022 (GB) 2200682.9

(51) Int. Cl. C12Q 1/689; C12N 1/20; C12Q 1/686; C12Q 1/6886; C12R 1/01

(52) U.S. Cl. CPC C12Q 1/689; C12N 1/205; C12Q 1/686; C12Q 1/6886; C12Q 2600/118; C12R 2001/01

(57) ABSTRACT

The present invention relates to prostate cancer (PC), in particular the identification of certain bacteria in prostate cancer tissues or liquid biopsies and the use of such identification as a prognostic indicator of cancer progression. The present invention also relates to cultures of newly identified bacteria and means for identifying such bacteria in biological samples.

### FIELD OF THE INVENTION

[0001] The present invention relates to prostate cancer (PC), in particular the identification of certain bacteria in prostate cancer tissues or liquid biopsies and the use of such identification as a prognostic indicator of cancer progression. The present invention also relates to cultures of newly identified bacteria and means for identifying such bacteria in biological samples.

### INTRODUCTION

[0002] Prostate cancer exhibits extreme clinical heterogeneity; 10-year survival rates following diagnosis approach 84%, yet prostate cancer is still responsible for 13% of all cancer deaths in men in the UK [1]. Coupled with the high rates of diagnosis, prostate cancer is more often a disease that men die with rather than from. This illustrates the need for clinically implementable tools able to selectively identify those men that can be safely removed from treatment pathways without missing those men harbouring disease that requires intervention.

[0003] An opportune point to intervene or supplement current clinical practices would be prior to an initial biopsy in men suspected of having prostate cancer, reducing costs to men, healthcare systems and providers alike. In current clinical practice men are selected for further investigations for prostate cancer if they have an elevated PSA (≥4 ng/mL) and an adverse finding on digital rectal examination (DRE) or lower urinary tract symptoms; other factors such as age and ethnicity are also considered [2,3,4].

[0004] D'Amico stratification [5], which classifies patients as Low-Intermediate- or High-risk of PSA-failure post-radical therapy, is based on Gleason Score (Gs) [6], PSA and clinical stage, and has been used as a framework for guidelines issued in the UK, Europe and USA [7,8,9]. Low-risk, and some favourable Intermediate-risk patients are generally offered Active Surveillance (AS) while unfavourable Intermediate-, and High-risk patients are considered for radical therapy [7,10]. Other classification systems such as CAPRA score [11] use additional clinical information, assigning simple numeric values based on age, pre-treatment PSA, Gleason Score, percentage of biopsy cores positive for cancer and clinical stage for an overall 0-10 CAPRA score. The CAPRA score has shown favourable prediction of PSA-free survival, development of metastasis and prostate cancer-specific survival [12].

[0005] However, the rates of negative biopsies in men with a clinical suspicion of prostate cancer are overwhelming; a recent population-level study of 419,582 men from Martin et al observed that 60% of all biopsies in the control arm of the Cluster Randomized Trial of PSA Testing for Prostate Cancer (CAP) were negative for prostate cancer [13], similar to the rates observed by Donovan et al as part of the ProtecT trial [14]. Needle biopsy is invasive, and not without complications: 44% of patients report pain as a result of the biopsy, and detection of clinically insignificant disease can result in years of monitoring, causing patients undue stress [4]. Multiparametric MRI (MP-MRI) has been developed as a triage tool to reduce the rates of negative biopsy and its use has become increasingly widespread since its validation [15]. However, MP-MRI is relatively expensive and has shown a high rate of inter-operator and inter-machine variability, leading to mpMRI missing up to 28% of clinically significant diseases in practice [4,16,17,18].

[0006] The interconnected nature of the male urological system makes it an ideal candidate for liquid biopsy and non-invasive biomarkers for prostate cancer. There is sizeable interest in the development of such non-invasive tests and classifiers capable of reducing the rates of initial biopsy in men, whilst retaining the sensitivity to detect aggressive disease. Single-gene or expression panels of few genes, such as the PCA3 [19], SelectMDx [20], ExoDx Prostate(IntelliScore) [21] tests have published promising results to date for the non-invasive detection of significant disease (Gleason score (Gs)≥7).

[0007] Prostate cancer is the most common non-skin malignancy in men in developed countries, with over 250,000 deaths per year worldwide. It is more common in black men [22] and is becoming an increasingly important issue in North and East Asia [23]. Although the underlying causes of most prostate cancer remain obscure, genetic inheritance has an established role [24] and chronic inflammation has been proposed as an aetiological factor [25,26,27]. Bacteria can be found in the urogenital tract and in prostate tissue [25], and alterations in the bacteria present in urine and faeces have been associated with the development of prostate cancer [26,28]. The clinical course of prostate cancer progression is highly heterogeneous and critical decisions are made about the likelihood of disease progression based on information obtained at presentation, dictating treatment choice. Current guidelines in the UK, USA, and Europe incorporate an assessment of low, intermediate or high D'Amico progression risk, which is calculated using levels of the serum biomarker PSA (Prostate Specific Antigen), the histopathological Gleason score determined following prostate needle biopsy, and clinical stage [29]. Problems associated with obtaining representative cancer samples using needle biopsy have generated considerable interest in developing complementary non-invasive tests in order to detect clinically significant prostate cancer that will progress. Examining prostate-derived material harvested from urine has the potential to achieve this. Material secreted by the prostate gland frequently appears in the urine, and reflux of urine into the prostate is well established suggesting the existence of a prostate-urine loop [30,31,32]. Several urine biomarkers identified include assessment of gene methylation [33], or gene expression profiles including the PUR test [34] and combinations of such markers [35]. However, currently none of these tests are in widespread clinical use. The challenge remains to find a combination of biomarkers and clinical data that at initial patient assessment prior to biopsy can reliably predict the presence of prostate cancer that will progress clinically and become potentially life threatening: also referred to as aggressive prostate cancer.

[0008] There is a link between the presence of prostate cancer and distinct microbial profiles in the gastrointestinal tract [28,36,37] and encouragingly different microbes are present in prostate tissue from patients with different Gleason grades [38]. The bacteria identified are known to induce inflammation [39] or transformation [25] in model systems (reviewed in refs 25, 39 and 40). A variety of potential neoplasm promoting molecular mechanisms have been described for bacteria including the production of DNA-binding genotoxic agent [39] and chronic exposure to ROS or inhibition of tumour suppressor p53 [40]. Subversion of metabolic processes within human cells has been reported [25, 28, 36], including production of metabolites such as short-chain fatty acids (e.g., propionic acid produced by Cutibacterium acnes) which could impact on locally infiltrated T-cell populations and immunosuppression [25, 36]. Despite this, establishing a firm link between the presence of micro-organisms and the development of prostate cancer has remained elusive, hindered by problems of sample contamination and the limited characterisation of the microbiota present.

[0009] In the current study we have used independent sample collections of different tissue types; controls selected from disease staged individuals; population level 16S and mRNA sequencing as well as culture and whole genome sequence data. This allowed us to use non-biased “tree of life” [41]methodology to classify the novel bacteria isolated and seek associations with disease progression.

### SUMMARY OF THE INVENTION

[0010] The present invention provides a method of detecting the presence of one or more bacteria selected from the genera Fenollaria, Ezakiella, Peptoniphilus, Porphyromonas, Anaerococcus, Varibaculum and Fusobacterium in a biological sample from the patient. The present invention also provides a method of detecting the presence of one or more bacteria selected from the genera Fenollaria, Peptoniphilus, Porphyromonas, Anaerococcus and Fusobacterium in a biological sample from the patient.

[0011] In some embodiments, the one or more bacteria are selected from: Fenollaria sporofastidiosus, Peptoniphilus rachelemmaiella, Peptoniphilus harei, Peptoniphilus coxii, Anaerococcus prevotii, Anaerococcus lactolyticus, Porphyromonas bobii, Porphyromonas asaccharolytica, Porphyromonas bennonis and Fusobacterium nucleatum. In some embodiments, the one or more bacteria are selected from: Fenollaria sporofastidiosus, Peptoniphilus rachelemmaiella, Peptoniphilus harei, Anaerococcus prevotii, Porphyromonas bobii, Porphyromonas asaccharolytica and Fusobacterium nucleatum.

[0012] In some embodiments, the one or more bacteria are selected from: Fenollaria sporofastidiosus, Peptoniphilus rachelemmaiella, Anaerococcus prevotii, Porphyromonas bobii, Porphyromonas asaccharolytica and Fusobacterium nucleatum. In some embodiments, the one or more bacteria are selected from: Fenollaria sporofastidiosus, Peptoniphilus harei, Anaerococcus prevotii, Porphyromonas bobii, Porphyromonas asaccharolytica and Fusobacterium nucleatum. In some embodiments, the one or more bacteria are selected from: Fenollaria sporofastidiosus, Peptoniphilus rachelemmaiella, Peptoniphilus harei, Anaerococcus prevotii, Porphyromonas asaccharolytica and Fusobacterium nucleatum. In some embodiments, the one or more bacteria are selected from: Fenollaria sporofastidiosus, Peptoniphilus rachelemmaiella, Peptoniphilus harei, Anaerococcus prevotii, Porphyromonas bobii and Fusobacterium nucleatum. In some embodiments, the one or more bacteria are selected from: Fenollaria sporofastidiosus, Peptoniphilus rachelemmaiella, Anaerococcus prevotii, Porphyromonas bobii and Fusobacterium nucleatum. In some embodiments, the one or more bacteria are selected from: Fenollaria sporofastidiosus, Peptoniphilus rachelemmaiella, Anaerococcus prevotii, Porphyromonas asaccharolytica and Fusobacterium nucleatum. In some embodiments, the one or more bacteria are selected from: Fenollaria sporofastidiosus, Peptoniphilus harei, Anaerococcus prevotii, Porphyromonas bobii and Fusobacterium nucleatum. In some embodiments, the one or more bacteria are selected from: Fenollaria sporofastidiosus, Peptoniphilus harei, Anaerococcus prevotii, Porphyromonas asaccharolytica and Fusobacterium nucleatum.

[0013] In some embodiments, the method comprises detecting the presence of at least 1, 2, 3, 4, 5, 6, 7, 8, 9 or 10 different bacteria. In some embodiments, the method comprises detecting all of the species recited in a given list.

[0014] In some embodiments, the method comprises detecting each of Fenollaria sporofastidiosus, Peptoniphilus rachelemmaiella, Peptoniphilus harei, Peptoniphilus coxii, Anaerococcus prevotii, Anaerococcus lactolyticus, Porphyromonas bobii, Porphyromonas asaccharolytica, Porphyromonas bennonis and Fusobacterium nucleatum. In some embodiments, the method comprises detecting each of Fenollaria sporofastidiosus, Peptoniphilus rachelemmaiella, Peptoniphilus harei, Anaerococcus prevotii, Porphyromonas bobii, Porphyromonas asaccharolytica and Fusobacterium nucleatum.

[0015] In some embodiments, the method further comprises detecting the presence of one or more bacteria selected from Peptoniphilus coxii, Anaerococcus lactolyticus and Porphyromonas bennonis. In some embodiments, the method further comprises detecting the presence of Varibaculum prostatecancerukia.

[0016] In some embodiments, one or more of the bacteria are selected from: Fenollaria sporofastidiosus (identified by ECACC accession number 21092201 or DSMZ accession number DSM 34056), Peptoniphilus rachelemmaiella (identified by ECACC accession number 21092202 or DSMZ accession number DSM 34055) and Porphyromonas bobii (identified by ECACC accession number 21092204 or DSMZ accession number DSM 34063). In some embodiments, the bacteria is Varibaculum prostatecancerukia (identified by ECACC accession number 21092203 or DSMZ accession number DSM 34057).

[0017] In some embodiments, the biological sample is processed prior to determining the presence of the one or more bacteria in the biological sample. In some embodiments, determining the presence of the one or more bacteria comprises extracting a nucleic acid from the biological sample. In some embodiments, determining the presence of the one or more bacteria comprises extracting bacterial DNA from the biological sample. In some embodiments, determining the presence of the one or more bacteria comprises extracting bacterial RNAfrom the biological sample. In some embodiments, determining the presence of the one or more bacteria comprises extracting one or more bacterial proteins from the biological sample. In some embodiments, determining the presence of the one or more bacteria comprises extracting one or more bacteria-specific carbohydrates from the biological sample.

[0018] In some embodiments, the biological sample is a urine sample, a semen sample, a prostatic exudate sample, or any sample containing macromolecules or cells originating in the prostate, a whole blood sample, a serum sample, saliva, or a biopsy (such as a prostate tissue sample or a tumour sample). In some embodiments, the biological sample is a urine sample.

[0019] In some embodiments, the presence of the one or more bacteria is determined using techniques such as quantitative polymerase chain reaction (qPCR) or probe-based detection assays including, but not limited to, NanoString®. In some embodiments, the presence of the one or more bacteria is determined using quantitative polymerase chain reaction (qPCR) or probe-based detection assays (such as NanoString®) wherein the qPCR or probe-based detection assays are conducted on one or more of bacterial nucleic acids in the biological sample.

[0020] In some embodiments, determining the presence of the one or more bacteria comprises detecting one or more bacterial proteins in a sample. In some embodiments, determining the presence of the one or more bacteria comprises detecting one or more bacterial-specific carbohydrates. In some embodiments, the presence of the one or more bacteria is determined using matrix-assisted laser desorption/ionization-time of flight mass spectrometry (MALDI-TOF).

[0021] In some embodiments, determining the presence of the one or more bacteria comprises detecting one or more bacterial metabolites in a sample. In some embodiments, determining the presence of the one or more bacteria comprises detecting one or more anaerobic bacterial metabolites in a sample. In some embodiments, determining the presence of the one or more bacteria comprises detecting one or more bacterial metabolites using a kit comprising means for detecting one or more bacterial metabolites. In some embodiments, the kit comprising means for detecting one or more bacterial metabolites can comprise a dipstick comprising one or more binding molecules (e.g. antibodies) specific for one or more bacterial metabolites. In some embodiments, the one or more bacterial metabolites are detectable in a urine sample.

[0022] In some embodiments, the presence of the one or more bacteria is determined using quantitative polymerase chain reaction (qPCR) or a probe-based detection assay (such as NanoString®) using one or more primers comprising a nucleotide sequence selected from the list SEQ ID NO:1, SEQ ID NO:2, SEQ ID NO:3, SEQ ID NO:4, SEQ ID NO:5, SEQ ID NO:6, SEQ ID NO:7, SEQ ID NO:8, SEQ ID NO:9, SEQ ID NO:10, SEQ ID NO:11, SEQ ID NO:12, SEQ ID NO:13, SEQ ID NO:14, SEQ ID NO:15, SEQ ID NO:16, SEQ ID NO:17, SEQ ID NO:18, SEQ ID NO:19 and SEQ ID NO:20. In some embodiments, the presence of the one or more bacteria is determined using quantitative polymerase chain reaction (qPCR) or a probe-based detection assay (such as NanoString®) using one or more primers consisting of a nucleotide sequence selected from the list SEQ ID NO:1, SEQ ID NO:2, SEQ ID NO:3, SEQ ID NO:4, SEQ ID NO:5, SEQ ID NO:6, SEQ ID NO:7, SEQ ID NO:8, SEQ ID NO:9, SEQ ID NO:10, SEQ ID NO:11, SEQ ID NO:12, SEQ ID NO:13, SEQ ID NO:14, SEQ ID NO:15, SEQ ID NO:16, SEQ ID NO:17, SEQ ID NO:18, SEQ ID NO:19 and SEQ ID NO:20.

[0023] The present invention also provides a method of providing a cancer prognosis in a patient based on the presence of one or more bacteria in a biological sample from the patient, comprising:
[0024] (a) detecting the presence of one or more bacteria selected from the genera Fenollaria, Ezakiella, Peptoniphilus, Porphyromonas, Anaerococcus, Varibaculum and Fusobacterium in a biological sample from the patient, and
[0025] (b) providing a prognosis for the patient, wherein the patient has a poor prognosis if one or more of the bacteria are present in the biological sample.

[0026] The present invention also provides a method of providing a cancer prognosis in a patient based on the presence of one or more bacteria in a biological sample from the patient, comprising:
[0027] (a) detecting the presence of one or more bacteria selected from the genera Fenollaria, Peptoniphilus, Porphyromonas, Anaerococcus and Fusobacterium in a biological sample from the patient, and
[0028] (b) providing a prognosis for the patient, wherein the patient has a poor prognosis if one or more of the bacteria are present in the biological sample.

[0029] In some embodiments, the one or more bacteria are selected from: Fenollaria sporofastidiosus, Peptoniphilus rachelemmaiella, Peptoniphilus harei, Peptoniphilus coxii, Anaerococcus prevotii, Anaerococcus lactolyticus, Porphyromonas bobii, Porphyromonas asaccharolytica, Porphyromonas bennonis and Fusobacterium nucleatum. In some embodiments, the one or more bacteria are selected from: Fenollaria sporofastidiosus, Peptoniphilus rachelemmaiella, Peptoniphilus harei, Anaerococcus prevotii, Porphyromonas bobii, Porphyromonas asaccharolytica and Fusobacterium nucleatum.

[0030] In some embodiments, the one or more bacteria are selected from: Fenollaria sporofastidiosus, Peptoniphilus rachelemmaiella, Anaerococcus prevotii, Porphyromonas bobii, Porphyromonas asaccharolytica and Fusobacterium nucleatum. In some embodiments, the one or more bacteria are selected from: Fenollaria sporofastidiosus, Peptoniphilus harei, Anaerococcus prevotii, Porphyromonas bobii, Porphyromonas asaccharolytica and Fusobacterium nucleatum. In some embodiments, the one or more bacteria are selected from: Fenollaria sporofastidiosus, Peptoniphilus rachelemmaiella, Peptoniphilus harei, Anaerococcus prevotii, Porphyromonas asaccharolytica and Fusobacterium nucleatum. In some embodiments, the one or more bacteria are selected from: Fenollaria sporofastidiosus, Peptoniphilus rachelemmaiella, Peptoniphilus harei, Anaerococcus prevotii, Porphyromonas bobii and Fusobacterium nucleatum. In some embodiments, the one or more bacteria are selected from: Fenollaria sporofastidiosus, Peptoniphilus rachelemmaiella, Anaerococcus prevotii, Porphyromonas bobii and Fusobacterium nucleatum. In some embodiments, the one or more bacteria are selected from: Fenollaria sporofastidiosus, Peptoniphilus rachelemmaiella, Anaerococcus prevotii, Porphyromonas asaccharolytica and Fusobacterium nucleatum. In some embodiments, the one or more bacteria are selected from: Fenollaria sporofastidiosus, Peptoniphilus harei, Anaerococcus prevotii, Porphyromonas bobii and Fusobacterium nucleatum. In some embodiments, the one or more bacteria are selected from: Fenollaria sporofastidiosus, Peptoniphilus harei, Anaerococcus prevotii, Porphyromonas asaccharolytica and Fusobacterium nucleatum.

[0031] In some embodiments, the method comprises detecting the presence of at least 1, 2, 3, 4, 5, 6, 7, 8, 9 or 10 different bacteria. In some embodiments, the method comprises detecting all of the species recited in a given list.

[0032] In some embodiments, the method comprises detecting each of Fenollaria sporofastidiosus, Peptoniphilus rachelemmaiella, Peptoniphilus harei, Peptoniphilus coxii, Anaerococcus prevotii, Anaerococcus lactolyticus, Porphyromonas bobii, Porphyromonas asaccharolytica, Porphyromonas bennonis and Fusobacterium nucleatum. In some embodiments, the method comprises detecting each of Fenollaria sporofastidiosus, Peptoniphilus rachelemmaiella, Peptoniphilus harei, Anaerococcus prevotii, Porphyromonas bobii, Porphyromonas asaccharolytica and Fusobacterium nucleatum.

[0033] In some embodiments, the method further comprises detecting the presence of one or more bacteria selected from Peptoniphilus coxii, Anaerococcus lactolyticus and Porphyromonas bennonis. In some embodiments, the method further comprises detecting the presence of Varibaculum prostatecancerukia.

[0034] In some embodiments, one or more of the bacteria are selected from: Fenollaria sporofastidiosus (identified by ECACC accession number 21092201 or DSMZ accession number DSM 34056), Peptoniphilus rachelemmaiella (identified by ECACC accession number 21092202 or DSMZ accession number DSM 34055) and Porphyromonas bobii (identified by ECACC accession number 21092204 or DSMZ accession number DSM 34063). In some embodiments, the bacteria is Varibaculum prostatecancerukia (identified by ECACC accession number 21092203 or DSMZ accession number DSM 34057).

[0035] In some embodiments, a poor prognosis is associated with an increased risk of elevated rates of metastases. In some embodiments, a poor prognosis is associated with a progression of the cancer stage. In some embodiments, a poor prognosis is associated with an increase in prostate-specific antigen (PSA) and/or PSA failure. In some embodiments, a poor prognosis is associated with an increased cancer risk score, optionally wherein the risk score is a Gleason risk score.

[0036] In some embodiments, the biological sample is a urine sample, a semen sample, a prostatic exudate sample, or any sample containing macromolecules or cells originating in the prostate, a whole blood sample, a serum sample, saliva, or a biopsy (such as a prostate tissue sample or a tumour sample). In some embodiments, the biological sample is a urine sample.

[0037] In some embodiments, the method is used to determine whether a patient should be biopsied. In some embodiments, the biological sample is processed prior to determining the presence of the one or more bacteria in the biological sample. In some embodiments, determining the presence of the one or more bacteria comprises extracting a nucleic acid from the biological sample. In some embodiments, determining the presence of the one or more bacteria comprises extracting bacterial DNA from the biological sample. In some embodiments, determining the presence of the one or more bacteria comprises extracting bacterial RNA from the biological sample. In some embodiments, determining the presence of the one or more bacteria comprises detecting one or more bacterial proteins in a sample. In some embodiments, determining the presence of the one or more bacteria comprises detecting one or more bacterial-specific carbohydrates. In some embodiments, the presence of the one or more bacteria is determined using quantitative polymerase chain reaction (qPCR) or a probe-based detection assay (such as NanoString®).

[0038] In some embodiments, the presence of the one or more bacteria is determined using quantitative polymerase chain reaction (qPCR) or a probe-based detection assay (such as NanoString®) using one or more primers comprising a nucleotide sequence selected from the list SEQ ID NO:1, SEQ ID NO:2, SEQ ID NO:3, SEQ ID NO:4, SEQ ID NO:5, SEQ ID NO:6, SEQ ID NO:7, SEQ ID NO:8, SEQ ID NO:9, SEQ ID NO:10, SEQ ID NO:11, SEQ ID NO:12, SEQ ID NO:13, SEQ ID NO:14, SEQ ID NO:15, SEQ ID NO:16, SEQ ID NO:17, SEQ ID NO:18, SEQ ID NO:19 and SEQ ID NO:20. In some embodiments, the presence of the one or more bacteria is determined using quantitative polymerase chain reaction (qPCR) or a probe-based detection assay (such as NanoString®) using one or more primers consisting of a nucleotide sequence selected from the list SEQ ID NO:1, SEQ ID NO:2, SEQ ID NO:3, SEQ ID NO:4, SEQ ID NO:5, SEQ ID NO:6, SEQ ID NO:7, SEQ ID NO:8, SEQ ID NO:9, SEQ ID NO:10, SEQ ID NO:11, SEQ ID NO:12, SEQ ID NO:13, SEQ ID NO:14, SEQ 40 ID NO:15, SEQ ID NO:16, SEQ ID NO:17, SEQ ID NO:18, SEQ ID NO:19 and SEQ ID NO:20.

[0039] In some embodiments, the sample is from a human.

[0040] The present invention also provides a method of treating a cancer in a patient in need thereof, comprising providing a prognosis of a patient's cancer using a method according to the invention, and administering to the patient a therapy for treating cancer. The present invention also provides a method of treating cancer in a patient in need thereof, wherein the prognosis of the patient has been determined using a method according to the invention, comprising administering to the patient a therapy for treating cancer.

[0041] In some embodiments, the cancer is selected from the list: Acute Lymphoblastic Leukemia (ALL), Acute Myeloid Leukemia (AML), Adrenocortical Carcinoma, Kaposi Sarcoma (Soft Tissue Sarcoma), AIDS-Related Lymphoma (Lymphoma), Primary CNS Lymphoma (Lymphoma), Anal Cancer, Appendix Cancer, Astrocytomas, Atypical Teratoid/Rhabdoid Tumor, Central Nervous System (Brain Cancer), Basal Cell Carcinoma, Bile Duct Cancer, Bladder Cancer, Bone Cancer (includes Ewing Sarcoma and Osteosarcoma and Malignant Fibrous Histiocytoma), Brain Tumors, Breast Cancer, Bronchial Tumors (Lung Cancer), Burkitt Lymphoma—see Non-Hodgkin Lymphoma, Carcinoid Tumor (Gastrointestinal), Cardiac (Heart) Tumors, Medulloblastoma and Other CNS Embryonal Tumors, Germ Cell Tumor, Primary CNS Lymphoma, Cervical Cancer, Cholangiocarcinoma, Chordoma, Chronic Lymphocytic Leukemia (CLL), Chronic Myelogenous Leukemia (CML), Chronic Myeloproliferative Neoplasms, Colorectal Cancer, Craniopharyngioma, Cutaneous T-Cell Lymphoma, Ductal Carcinoma In Situ (DCIS), Embryonal Tumors, Medulloblastoma, Endometrial Cancer, Ependymoma, Esophageal Cancer, Esthesioneuroblastoma, Ewing Sarcoma (Bone Cancer), Extracranial Germ Cell Tumor, Extragonadal Germ Cell Tumor, Eye Cancer, Intraocular Melanoma, Retinoblastoma, Fallopian Tube Cancer, Fibrous Histiocytoma of Bone, Malignant, and Osteosarcoma, Gallbladder Cancer, Gastric (Stomach) Cancer, Gastrointestinal Carcinoid Tumor, Gastrointestinal Stromal Tumors (GIST), Germ Cell Tumors, Childhood Extracranial Germ Cell Tumors, Extragonadal Germ Cell Tumors, Ovarian Germ Cell Tumors, Testicular Cancer, Gestational Trophoblastic Disease, Hairy Cell Leukemia, Heart Tumors, Hepatocellular (Liver) Cancer, Histiocytosis, Langerhans Cell Hodgkin Lymphoma, Hypopharyngeal Cancer, Intraocular Melanoma, Islet Cell Tumors, Pancreatic Neuroendocrine Tumors, Kaposi Sarcoma (Soft Tissue Sarcoma), Kidney (Renal Cell) Cancer, Langerhans Cell Histiocytosis, Laryngeal Cancer, Leukemia, Lip and Oral Cavity Cancer, Liver Cancer, Lung Cancer (Non-Small Cell, Small Cell, Pleuropulmonary Blastoma, and Tracheobronchial Tumor), Lymphoma, Male Breast Cancer, Malignant Fibrous Histiocytoma of Bone and Osteosarcoma, Melanoma, Melanoma, Intraocular (Eye), Merkel Cell Carcinoma, Mesothelioma, Metastatic Squamous Neck Cancer with Occult Primary, Midline Tract Carcinoma With NUT Gene Changes, Mouth Cancer, Multiple Endocrine Neoplasia Syndromes, Multiple Myeloma/Plasma Cell Neoplasms, Mycosis Fungoides (Lymphoma), Myelodysplastic Syndromes, Myelodysplastic/Myeloproliferative Neoplasms, Myelogenous Leukemia, Chronic (CML), Myeloid Leukemia, Acute (AML), Myeloproliferative Neoplasms, Chronic Nasal Cavity and Paranasal Sinus Cancer, Nasopharyngeal Cancer, Neuroblastoma, Non-Hodgkin Lymphoma, Non-Small Cell Lung Cancer, Oral Cancer, Lip and Oral Cavity Cancer and Oropharyngeal Cancer, Osteosarcoma and Undifferentiated Pleomorphic Sarcoma of Bone Treatment, Ovarian Cancer, Pancreatic Cancer, Pancreatic Neuroendocrine Tumors (Islet Cell Tumors), Papillomatosis (Childhood Laryngeal), Paraganglioma, Paranasal Sinus and Nasal Cavity Cancer, Parathyroid Cancer, Penile Cancer, Pharyngeal Cancer, Pheochromocytoma, Pituitary Tumor, Plasma Cell Neoplasm/Multiple Myeloma, Pleuropulmonary Blastoma (Lung Cancer), Pregnancy and Breast Cancer, Primary Central Nervous System (CNS) Lymphoma, Primary Peritoneal Cancer, Prostate Cancer, Rectal Cancer, Recurrent Cancer, Renal Cell (Kidney) Cancer, Retinoblastoma, Rhabdomyosarcoma, Salivary Gland Cancer, Sarcoma, Childhood Rhabdomyosarcoma (Soft Tissue Sarcoma), Childhood Vascular Tumors (Soft Tissue Sarcoma), Ewing Sarcoma (Bone Cancer), Osteosarcoma (Bone Cancer), Soft Tissue Sarcoma, Uterine Sarcoma, Sezary Syndrome, Skin Cancer, Small Cell Lung Cancer, Small Intestine Cancer, Squamous Cell Carcinoma, Squamous Neck Cancer with Occult Primary, Metastatic, Stomach (Gastric) Cancer, T-Cell Lymphoma, Testicular Cancer, Throat Cancer, Nasopharyngeal Cancer, Oropharyngeal Cancer, Hypopharyngeal Cancer, Thymoma and Thymic Carcinoma, Thyroid Cancer, Tracheobronchial Tumors (Lung Cancer), Ureter and Renal Pelvis, Transitional Cell Cancer (Kidney (Renal Cell) Cancer, Urethral Cancer, Uterine Cancer, Vaginal Cancer, Vascular Tumors, Vulvar Cancer, Wilms Tumor, Myxofibrosarcoma, Leiomyosarcoma, Pleomorphic Sarcoma and Hepatopancreatobiliary cancer.

[0042] In some embodiments, the cancer is prostate cancer. In some embodiments, the therapy for cancer comprises surgery, brachytherapy, active surveillance, chemotherapy, hormone therapy, immunotherapy and/or radiotherapy. In some embodiments, the therapy for cancer comprises chemotherapy, hormone therapy and/or immunotherapy. In some embodiments, the chemotherapy comprises administration of one or more agents selected from the list: abiraterone acetate, apalutamide, bicalutamide, cabazitaxel, bicalutamide, degarelix, docetaxel, leuprolide acetate, enzalutamide, apalutamide, flutamide, goserelin acetate, mitoxantrone, nilutamide, sipuleucel T, radium 223 dichloride and docetaxel. In some embodiments, the therapy for cancer comprises resection of all or part of a tumour. In some embodiments, the cancer is prostate cancer and the therapy for cancer comprises resection of all or part of the prostate gland and/or all or part of a prostate tumour.

[0043] The present invention also provides a nucleotide primer comprising a sequence selected from the list SEQ ID NO:1, SEQ ID NO:2, SEQ ID NO:3, SEQ ID NO:4, SEQ ID NO:5, SEQ ID NO:6, SEQ ID NO:7, SEQ ID NO:8, SEQ ID NO:9, SEQ ID NO:10, SEQ ID NO:11, SEQ ID NO:12, SEQ ID NO:13, SEQ ID NO:14, SEQ ID NO:15, SEQ ID NO:16, SEQ ID NO:17, SEQ ID NO:18, SEQ ID NO:19 and SEQ ID NO:20.

[0044] The present invention also provides a nucleotide primer consisting of a sequence selected from the list SEQ ID NO:1, SEQ ID NO:2, SEQ ID NO:3, SEQ ID NO:4, SEQ ID NO:5, SEQ ID NO:6, SEQ ID NO:7, SEQ ID NO:8, SEQ ID NO:9, SEQ ID NO:10, SEQ ID NO:11, SEQ ID NO:12, SEQ ID NO:13, SEQ ID NO:14, SEQ ID NO:15, SEQ ID NO:16, SEQ ID NO:17, SEQ ID NO:18, SEQ ID NO:19 and SEQ ID NO:20.

[0045] The present invention also provides a kit for determining the presence of one or more bacteria in a biological sample, comprising means for detecting one or more bacteria selected from the genera Fenollaria, Ezakiella, Peptoniphilus, Porphyromonas, Anaerococcus, Varibaculum and Fusobacterium in a biological sample.

[0046] The present invention also provides a kit for determining the presence of one or more bacteria in a biological sample, comprising means for detecting one or more bacteria selected from the genera Fenollaria, Peptoniphilus, Porphyromonas, Anaerococcus and Fusobacterium in a biological sample.

[0047] In some embodiments of kits of the invention, the one or more bacteria are selected from: Fenollaria sporofastidiosus, Peptoniphilus rachelemmaiella, Peptoniphilus harei, Peptoniphilus coxii, Anaerococcus prevotii, Anaerococcus lactolyticus, Porphyromonas bobii, Porphyromonas asaccharolytica, Porphyromonas bennonis and Fusobacterium nucleatum.

[0048] In some embodiments of kits of the invention, the one or more bacteria are selected from: Fenollaria sporofastidiosus, Peptoniphilus rachelemmaiella, Peptoniphilus harei, Anaerococcus prevotii, Porphyromonas bobii, Porphyromonas asaccharolytica and Fusobacterium nucleatum. In some embodiments of kits of the invention, the one or more bacteria are selected from: Fenollaria sporofastidiosus, Peptoniphilus rachelemmaiella, Anaerococcus prevotii, Porphyromonas bobii, Porphyromonas asaccharolytica and Fusobacterium nucleatum. In some embodiments of kits of the invention, the one or more bacteria are selected from: Fenollaria sporofastidiosus, Peptoniphilus harei, Anaerococcus prevotii, Porphyromonas bobii, Porphyromonas asaccharolytica and Fusobacterium nucleatum. In some embodiments of kits of the invention, the one or more bacteria are selected from: Fenollaria sporofastidiosus, Peptoniphilus rachelemmaiella, Peptoniphilus harei, Anaerococcus prevotii, Porphyromonas asaccharolytica and Fusobacterium nucleatum. In some embodiments of kits of the invention, the one or more bacteria are selected from: Fenollaria sporofastidiosus, Peptoniphilus rachelemmaiella, Peptoniphilus harei, Anaerococcus prevotii, Porphyromonas bobii and Fusobacterium nucleatum. In some embodiments of kits of the invention, the one or more bacteria are selected from: Fenollaria sporofastidiosus, Peptoniphilus rachelemmaiella, Anaerococcus prevotii, Porphyromonas bobii and Fusobacterium nucleatum. In some embodiments of kits of the invention, the one or more bacteria are selected from: Fenollaria sporofastidiosus, Peptoniphilus rachelemmaiella, Anaerococcus prevotii, Porphyromonas asaccharolytica and Fusobacterium nucleatum. In some embodiments of kits of the invention, the one or more bacteria are selected from: Fenollaria sporofastidiosus, Peptoniphilus harei, Anaerococcus prevotii, Porphyromonas bobii and Fusobacterium nucleatum. In some embodiments of kits of the invention, the one or more bacteria are selected from: Fenollaria sporofastidiosus, Peptoniphilus harei, Anaerococcus prevotii, Porphyromonas asaccharolytica and Fusobacterium nucleatum.

[0049] In some embodiments of kits of the invention, the kit comprises means for detecting the presence of at least 1, 2, 3, 4, 5, 6, 7, 8, 9 or 10 different bacteria. In some embodiments of kits of the invention, the kit comprises means for detecting all of the species recited in a given list.

[0050] In some embodiments of kits of the invention, the kit comprises means for detecting each of Fenollaria sporofastidiosus, Peptoniphilus rachelemmaiella, Peptoniphilus harei, Peptoniphilus coxii, Anaerococcus prevotii, Anaerococcus lactolyticus, Porphyromonas bobii, Porphyromonas asaccharolytica, Porphyromonas bennonis and Fusobacterium nucleatum. In some embodiments of kits of the invention, the kit comprises means for detecting each of Fenollaria sporofastidiosus, Peptoniphilus rachelemmaiella, Peptoniphilus harei, Anaerococcus prevotii, Porphyromonas bobii, Porphyromonas asaccharolytica and Fusobacterium nucleatum. In some embodiments of kits of the invention, the kit further comprises means for detecting the presence of one or more bacteria selected from Peptoniphilus coxii, Anaerococcus lactolyticus and Porphyromonas bennonis. In some embodiments of kits of the invention, the kit further comprises means for detecting the presence of Varibaculum prostatecancerukia.

[0051] In some embodiments of kits of the invention, one or more of the bacteria are selected from: Fenollaria sporofastidiosus (identified by ECACC accession number 21092201 or DSMZ accession number DSM 34056), Peptoniphilus rachelemmaiella (identified by ECACC accession number 21092202 or DSMZ accession number DSM 34055) and Porphyromonas bobii (identified by ECACC accession number 21092204 or DSMZ accession number DSM 34063). In some embodiments of kits of the invention, the bacteria is Varibaculum prostatecancerukia (identified by ECACC accession number 21092203 or DSMZ accession number DSM 34057).

[0052] In some embodiments of kits of the invention, the means for detecting is a biosensor or specific binding molecule. In some embodiments of kits of the invention, the biosensor is an electrochemical, electronic, piezoelectric, gravimetric, pyroelectric biosensor, ion channel switch, evanescent wave, surface plasmon resonance or biological biosensor. In some embodiments of kits of the invention, the biosensor is an antigen-specific binding molecule capable of specifically binding to the one or more bacteria, optionally wherein the antigen-specific binding molecule is an antibody or fragment thereof. In some embodiments of kits of the invention, the biosensor is an antigen-specific binding molecule capable of specifically binding to the one or more bacterial metabolites, optionally wherein the antigen-specific binding molecule is an antibody or fragment thereof. In some embodiments of kits of the invention, the biosensor is an antigen-specific binding molecule capable of specifically binding to the one or more anaerobic bacterial metabolites, optionally wherein the antigen-specific binding molecule is an antibody or fragment thereof. In some embodiments, the one or more bacterial metabolites are detectable in a urine sample.

[0053] In some embodiments of kits of the invention, the means for detecting is quantitative polymerase chain reaction (qPCR) or a probe-based detection assay (such as NanoString®). In some embodiments of kits of the invention, the means for detecting is quantitative polymerase chain reaction (qPCR) or a probe-based detection assay (such as NanoString®) and the kit comprises one or more primers comprising a nucleotide sequence selected from the list SEQ ID NO:1, SEQ ID NO:2, SEQ ID NO:3, SEQ ID NO:4, SEQ ID NO:5, SEQ ID NO:6, SEQ ID NO:7, SEQ ID NO:8, SEQ ID NO:9, SEQ ID NO:10, SEQ ID NO:11, SEQ ID NO:12, SEQ ID NO:13, SEQ ID NO:14, SEQ ID NO:15, SEQ ID NO:16, SEQ ID NO:17, SEQ ID NO:18, SEQ ID NO:19 and SEQ ID NO:20. In some embodiments of kits of the invention, the means for detecting is quantitative polymerase chain reaction (qPCR) or a probe-based detection assay (such as NanoString®) and the kit comprises one or more primers consisting of a nucleotide sequence selected from the list SEQ ID NO:1, SEQ ID NO:2, SEQ ID NO:3, SEQ ID NO:4, SEQ ID NO:5, SEQ ID NO:6, SEQ ID NO:7, SEQ ID NO:8, SEQ ID NO:9, SEQ ID NO:10, SEQ ID NO:11, SEQ ID NO:12, SEQ ID NO:13, SEQ ID NO:14, SEQ ID NO:15, SEQ ID NO:16, SEQ ID NO:17, SEQ ID NO:18, SEQ ID NO:19 and SEQ ID NO:20.

[0054] The present invention also provides a cell culture comprising bacteria Varibaculum prostatecancerukia identified by ECACC deposit number 21092203 or DSMZ accession number DSM 34057.

[0055] The present invention also provides a cell culture comprising bacteria Fenollaria sporofastidiosus identified by ECACC deposit number 21092201 or DSMZ accession number DSM 34056.

[0056] The present invention also provides a cell culture comprising bacteria Peptoniphilus rachelemmaiella identified by ECACC deposit number 21092202 or DSMZ accession number DSM 34055.

[0057] The present invention also provides a cell culture comprising bacteria Porphyromonas bobii identified by ECACC deposit number 21092204 or DSMZ accession number DSM 34063.

[0058] The present invention also provides use of a cell culture according to the invention in providing a prognosis of cancer in a patient.

[0059] The present invention also provides a computer apparatus configured to perform a method according to the invention or a computer readable medium programmed to perform a method according to the invention.

[0060] In some embodiments, one or more of the bacteria comprise 1, 2, 3, 4, 5, 6 or 7 bacteria selected from: Fenollaria sporofastidiosus, Peptoniphilus rachelemmaiella, Peptoniphilus harei, Anaerococcus prevotii, Porphyromonas bobii, Porphyromonas asaccharolytica and Fusobacterium nucleatum. In some embodiments, one or more of the bacteria comprise 2 bacteria selected from: Fenollaria sporofastidiosus, Peptoniphilus rachelemmaiella, Peptoniphilus harei, Anaerococcus prevotii, Porphyromonas bobii, Porphyromonas asaccharolytica and Fusobacterium nucleatum. In some embodiments, one or more of the bacteria comprise 3 bacteria selected from: Fenollaria sporofastidiosus, Peptoniphilus rachelemmaiella, Peptoniphilus harei, Anaerococcus prevotii, Porphyromonas bobii, Porphyromonas asaccharolytica and Fusobacterium nucleatum. In some embodiments, one or more of the bacteria comprise 4 bacteria selected from: Fenollaria sporofastidiosus, Peptoniphilus rachelemmaiella, Peptoniphilus harei, Anaerococcus prevotii, Porphyromonas bobii, Porphyromonas asaccharolytica and Fusobacterium nucleatum. In some embodiments, one or more of the bacteria comprise 5 bacteria selected from: Fenollaria sporofastidiosus, Peptoniphilus rachelemmaiella, Peptoniphilus harei, Anaerococcus prevotii, Porphyromonas bobii, Porphyromonas asaccharolytica and Fusobacterium nucleatum. In some embodiments, one or more of the bacteria comprise 6 bacteria selected from: Fenollaria sporofastidiosus, Peptoniphilus rachelemmaiella, Peptoniphilus harei, Anaerococcus prevotii, Porphyromonas bobii, Porphyromonas asaccharolytica and Fusobacterium nucleatum. In some embodiments, one or more of the bacteria comprise all 7 bacteria Fenollaria sporofastidiosus, Peptoniphilus rachelemmaiella, Peptoniphilus harei, Anaerococcus prevotii, Porphyromonas bobii, Porphyromonas asaccharolytica and Fusobacterium nucleatum.

[0061] The present invention also provides a nucleotide primer comprising a sequence between 5 and 25 nucleotides in length that is substantially complementary or reverse complementary to a corresponding length portion of SEQ ID NO:25. In some embodiments, the primer is capable of detecting the presence of Varibaculum prostatecancerukia in a biological sample.

[0062] The present invention also provides a nucleotide primer comprising a sequence between 5 and 25 nucleotides in length that is substantially complementary or reverse complementary to a corresponding length portion of SEQ ID NO:26. In some embodiments, the primer is capable of detecting the presence of Fenollaria sporofastidiosus in a biological sample.

[0063] The present invention also provides a nucleotide primer comprising a sequence between 5 and 25 nucleotides in length that is substantially complementary or reverse complementary to a corresponding length portion of a sequence selected from the list consisting of SEQ ID NOs:27-67. In some embodiments, the primer is capable of detecting the presence of Peptoniphilus rachelemmaiella in a biological sample.

[0064] The present invention also provides a nucleotide primer comprising a sequence between 5 and 25 nucleotides in length that is substantially complementary or reverse complementary to a corresponding length portion of a sequence selected from the list consisting of SEQ ID NOs:68-84. In some embodiments, the primer is capable of detecting the presence of Porphyromonas bobii in a biological sample.

[0065] In some embodiments, the presence of the one or more bacteria is determined using quantitative polymerase chain reaction (qPCR) or a probe-based detection assay (such as NanoString®) using one or more primers according to the invention. In some embodiments of kits of the invention, the means for detecting is quantitative polymerase chain reaction (qPCR) or a probe-based detection assay (such as NanoString®) using one or more primers according to the invention.

[0066] The present invention also provides use of a cell culture according to the invention in providing a prognosis of cancer in a patient. The present invention also provides a computer apparatus configured to perform a method according to the invention or, a computer readable medium programmed to perform a method according to the invention.

[0067] In some embodiments of the invention methods of the invention may comprise measuring one or more genera of bacteria in combination with one or more species of bacteria. In some embodiments of the invention kits of the invention may comprise means for measuring one or more genera of bacteria (for example pan-genera primers or probes) in combination with means for measuring one or more species of bacteria (for example species-specific primers or probes). Throughout this specification where a list of particular species of bacteria are specified as a narrower embodiment of methods or kits reciting a list of genera of bacteria, the methods or kits may comprise one or more genera from the specified list of genera in combination with one or more species from the specified list of species. The lists of particular species are intended to define species which may be used in combination with the other species and/or genera in a given list or as an alternative to use of the entire genera. For example, a method reciting use of genera Fenollaria, Ezakiella, Peptoniphilus, Porphyromonas, Anaerococcus, Varibaculum and Fusobacterium may include the particular species Fenollaria sporofastidiosus in place of the genera Fenollaria or may include Fenollaria sporofastidiosus in combination with any one or more other genera listed. Similarly, the method may include any one or more of Peptoniphilus rachelemmaiella, Peptoniphilus harei and Peptoniphilus coxii in place of the genera Peptoniphilus or any one or more of Peptoniphilus rachelemmaiella, Peptoniphilus harei and Peptoniphilus coxii in combination with any one or more of the other genera listed.

### BRIEF DESCRIPTION OF THE FIGURES

[0068] FIG. 1—Presence of bacteria in urine cell sediment and association with prostate cancer clinical grade. A) Example fluorescence microscopy images of urine cell sediment sample stained with DAPI are negative (left) and positive (right) for background fluorescence bacteria staining, scale bar 30 μm. In the left-hand panel only DAPI fluoresce corresponding to eukaryotic nuclei can be observed. The presence of background DAPI fluorescence correlated to the presence of bacterial 16S PCR products (χ²-test, df=1, P=9.3×10⁻¹⁰) (Table 5). B) Example scanning electron microscopy images of the urine from two patients exhibiting staining for background DAPI fluorescence showing the morphological appearance of bacterial cells. Scale bar 1 μm. Scanning electron microscopy performed for 5 additional patients gave similar appearance. C) Significant correlation of D'Amico clinical category and the presence of background DAPI stained bacteria fluorescence in post-DRE urine. Data are presented as percentage positive for bacteria/microorganisms. Discovery set (n=215 samples, chi-squared test for trend in proportions, positive trend, P=2.2×10⁻⁶), Validation set (n=103 samples, chi-squared test for trend in proportions, positive trend, P=4.5×10⁻⁰⁵).

[0069] FIG. 2—Phylogenetic tree and novel bacteria. A) Cultured fastidious anaerobes were isolated from urine and prostate and their genomes were decoded using Illumina and Nanopore DNA sequencing. Each bacterial strain was positioned on the phylogenetic tree as described in Methods. Bacteria with a known ID are highlighted with diamonds and a † symbol, while novel species are highlighted with diamonds and a * symbol (I: Varibaculum sp. nov., II: Fenollaria sp. nov., III: Peptoniphilus sp. nov. and IV: Porphyromonas sp. nov.) B) Genome representation for two of the novel species where the entire genomes could be constructed. Data on: I, Varibaculum sp. nov. isolate 39, 2.2 Mb, GC content, 53%; II, Fenollaria sp. nov. isolate 24, 1.6 Mb, GC content, 36%; III, Peptoniphilus sp. nov. isolate 23, 1.9 Mb, GC content 49%, and IV, Porphyromonas sp. nov. (isolate 6C, 2.2 Mb, GC content 56%) amongst other isolates are in FIG. 15 and Table 3, FIG. 8A-D. PVC: Planctomycetes, Verrucomicrobiae, Chlamydiae group.

[0070] FIG. 3—Presence and composition of urine and prostate tissue microbiota identify participants with a poorer prognosis. Analysis of 16S OTU sequence from urine sediments (A-C). A) Principal Coordinate Analysis (PCoA, Manhattan distance) of family level OTU data from urine sediments from 46 patients undergoing assessment for prostate cancer. Cluster 1 (black, upper left), Cluster 2 (yellow, upper right) and Cluster 3 (green, lower). Samples from patients that developed skeletal metastases are indicated with stars. B) Heatmap demonstrating a variety of bacterial genera selected to demonstrate differences across the 3 family level clusters. C) Kaplan-Meier analysis investigating metastasis free survival: cluster one (black, lower line); clusters two plus three (pink, upper line). (D-F) The presence of the following genera was used to partition sample sets: Fenollaria (including hits to Ezakiella due to closely related 16S sequences to Fenollaria), Peptoniphilus, Porphyromonas, Anaerococcus and Fusobacterium. These genera collectively constitute the anaerobic bacteria biomarker set (ABBS) in this manuscript. Data were from: (D) urine cell sediment fraction 16S sequencing; (E) RNA sequencing of urine exosome fraction; and (F) whole genome ICGC DNA sequence data from prostate cancer tissue. All “P” values are calculated using the log-rank test. Univariate cox proportional hazards models are summarised in FIG. 10. The hazard ratios (95% confidence intervals) are respectively as follows: 6.18 (95% Cl: 0.81-47.3), 6.10 (95% Cl: 1.34-27.26) and 2.07 (95% Cl: 1.04-4.15). A meta-analysis of these three models gave HR 2.93 (95% Cl: 1.43-6). A forest plot of this meta-analysis is available in FIG. 10.

[0071] FIG. 4—Predicted bacterial functions and metabolic pathways. Predicted proteins and metabolic pathways were determined with Prokka annotation and InterProScan analyses. The data shown highlight pathways across assembled isolates from urine and prostate secretions. Columns are ordered to highlight species isolated belonging to the ABBS genera (left ‘ABBS isolates’) vs bacteria that do not have sufficient evidence for contributing towards a poorer prognosis and were isolated from urine samples from patients with no evidence of cancer (right ‘Non-ABBS isolates’). The colour of each cell denotes the number of genes in an assembly that are estimated to contribute towards a particular function. The pathways in this heatmap were curated to demonstrate those with biological or therapeutic potential.

[0072] FIG. 5—Association of presence of bacterial aggregates with prostate cancer clinical grade. A) Scanning electron microscopy image of bacterial aggregates in urine cell sediment fraction, post-DRE. Magnification: 2,500×, scale bar indicates 10 μm. B) Fluorescence microscopy image of bacterial aggregates and human cell nuclei stained with 4′,6-diamidino-2-phenylindole (DAPI), scale bar indicates 10 μm. C) Association of presence of bacterial aggregates in post-DRE urine cell sediment and clinical category (P=0.006, log-rank test).

[0073] FIG. 6—Fluorescence microscopy images of cells in urine samples stained with DAPI. Example images of microorganisms associated with human cell nuclei (scale bar 10 μm). Microorganisms and human cell nuclei were stained with DAPI. Variation of focal depth demonstrated the presence of microorganisms within the eukaryotic cells.

[0074] FIG. 7—Comparison of Propionimicrobium lymphophilum isolated strains with reference strain DSM4903 and Cutibacterium acnes. The colour of the box surrounding a bacteria name (left) links to the map of that bacteria in the same colour shown on the circos plot (right). From the inside circus plot to outer: Propionimicrobium lymphophilum reference strain DSM4903 (light pink); Propionimicrobium lymphophilum isolate 4 (royal blue); Propionimicrobium lymphophilum isolate 9 (light blue); Propionimicrobium lymphophilum isolate 10 (yellow); Propionimicrobium lymphophilum isolate 3 (green); Propionimicrobium lymphophilum isolate 40 (orange); Cutibacterium acnes (pink).

[0075] FIG. 8—Bacteria isolated from urine and prostate secretion samples. Phylogenetic tree and colony morphology of isolated bacteria are presented. The panels of this Figure (FIG. 8 A to D) are an expansion of sections of FIG. 2. The coloured diamonds indicate characterised colonies corresponding to novel species ( [symbol] *) and those with known ID ( [symbol] †). Properties of the four novel species are as follows. Novel 1: Peptoniphilus sp. nov. isolate 23, (phyla Firmicutes, class Clostridia) isolated from urine sample of a high-risk prostate cancer patient. Colony appearance 2 mm slight yellow, grey tinge, glossy (A) Novel 2: Fenollaria sp. nov. isolates (24, 27A, 27B, 29, 35) belonging to genus Fenollaria, (phyla Firmicutes, class Clostridia) were isolated from a urine sample of a high-risk prostate cancer patient. Colony appearance 1-2 mm flat grey (A), a spore-forming pleomorphic species ranging in appearance from tiny <500 nm coccoid forms to larger filamentous forms (see FIG. 12 for further images). Novel 3: Varibaculum sp. nov. isolate 39, (phyla, class Actinobacteria) isolated from urine sample of a patient assessed for prostate cancer. A prostate biopsy tissue sample from this patient had atrophy and inflammation but there was no evidence of cancer. Colony appearance 1 mm, round grey and glossy, with α-haemolysis on brucella blood agar plates (C). Novel 4: Porphyromonas sp. nov., isolate 6C, isolated from prostate secretion fluid from prostatectomy specimen from a patient with intermediate risk prostate cancer. Colony appearance, small 1 mm, glossy grey pigmented (D), pleomorphic species, coccoid and filamentous forms.

[0076] FIG. 9—Partitioning of bacteria between Principle Coordinate Analysis clusters. (A-C) Principal Coordinates Analysis of bacterial communities from 16S sequencing of urine sediment fraction (Manhattan distance, Family level). The first three principal coordinates are shown along with the percentage of variation of the dataset that the axis demonstrates. (D) Plots of relative abundance (y-axis) for various bacterial genera. Differences are investigated between the poor prognosis cluster (Cluster 1) and the rest of the dataset (Clusters 2+3). P=Unpaired Wilcoxon Rank Sum test with q=Benjamini-Hochberg correction for multiple comparisons.

[0077] FIG. 10—Forest plot showing a meta-analysis of univariate cox proportional hazards models demonstrating hazard ratio (HR) for three technologies (16S sequencing, ICGC whole genome sequencing and Urine RNA shotgun sequencing) along with 95% confidence intervals. A) Clinical endpoints and R packages used were as discussed in methods. Heterogeneity between studies appears low (Higgin's & Thompson's I2=0%, chi-squared χ2=1.55, but not significant at P=0.46). The meta-analysis was determined using a random effects model. B) Forest plot showing multivariate analysis for the ICGC cohort with covariates including prostate specific antigen (PSA) blood test at the time of radical prostatectomy (RP), age at diagnosis, tumour size at diagnosis, Gleason Grade and ABBS detection status. (16S sequencing, ICGC whole genome sequencing and Urine RNA shotgun sequencing) along with 95% confidence intervals. Clinical endpoints and R packages used were as discussed in methods. Heterogeneity between studies appears low (Higgin's & Thompson's I²=13%, chi-squared χ2=2.3, but not significant at P=0.32). The meta-analysis was determined using a random effects model.

[0078] FIG. 11—Co-occurrence of bacteria genera identified in urine sediment from men with high risk, advanced/metastatic prostate cancer. Co-occurrence plot prepared using MEGAN Community Edition (version 6.8.12). Bacterial genera assigned from the 16S sequencing dataset as described in methods and results were included in the analyses. Samples included were from men with high risk and advanced/metastatic prostate cancer (n=14), both the V1-V3 and V3-V5 16S sequencing data analyses were included. The minimum percentage probability with which two classes co-occur in samples is 75%. Circles are coloured by phylum and named at the level of genus. The black straight lines joining circles indicate co-occurrence. Light peach/orange=Firmicutes, includes Fenollaria sp.; Peptoniphilus sp., Anerococcus sp, Finegoldia sp. Green=Bacteroidetes. Purple=Proteobacteria. The orange diamond [symbol] * indicates that novel species were isolated belonging the genera. The blue diamond [symbol] † indicates that we isolated and cultured several species belonging to these genera (details in FIG. 2, FIG. 8 and FIG. 11).

[0079] FIG. 12—Images of Fenollaria sp. nov. displaying pleomorphic growth and sporulation. Images on the left are differential interference contrast microscopy images of Fenollaria sp. nov. after growth under anaerobic conditions in PY broth and images on the right are corresponding fluorescent microscopy images of Fenollaria sp. nov. stained with DAPI, scale bar indicates 10 μm.

[0080] FIG. 13—An overviewflow chart of the analyses in this study highlighting the identification of ABBS and novel species.

[0081] FIG. 14—Association of presence of bacteria in urine sediment with prostate cancer clinical grade, stage and PSA. Data are presented in A-C as percentage positive for bacteria/microorganisms. 0+0=PSA normal for age and no cancer detected on biopsy; Gleason score 3+3, 3+4, 4+3, 4+4>8; A=advanced prostate cancer. (A, B) association of presence of bacteria and prostate cancer Gleason Score, significant positive trend across increased cancer grade, Discovery set (χ²-test, 15.01, df=1, p=1.1×10-4) and Validation set (χ²-test, 9.11, df=1, p=2.5×10-3). (C) significant association of samples positive for bacteria and clinical T stage (χ²-test, 18.01, df=1, p=2.2×10-5) (D) samples positive for bacteria were from participants with significantly higher PSA results (p=1.7×10-8, Mann-Whitney U test). There was also a slight increase in the age of those patients that have bacteria present (median 70 vs 67, Mann-Whitney U test: P=0.048).

[0082] FIG. 15—Bacterial species cultured from urine samples and prostate secretions. Table documents culture morphology and genomic characteristics for each of the isolates including colony appearance, novelty, average sequencing coverage genome size, GC content, number of contigs, estimated number of genes (calculated using the Prokka tool, version 1.13.3). Average sequencing coverage was calculated with BBMap version 37.28. All isolates were characterised by Illumina sequencing. Strains 24, 25 and 39 were subject to additional long read sequencing using the Oxford Nanopore MinION.

[0083] FIG. 16—Detection of bacterial species in urine samples using qPCR assays. Data presented as percentage of samples positive for bacteria genera or species across the clinical categories. Significant associations (p<0.05) for the presence of bacteria in urine with increasing prostate cancer clinical grade and risk groups was observed for the bacteria. Bacteria from Firmicutes phyla of bacteria (FIGS. 16A and 16B; 16E and 16F), and Bacteroidota phyla (FIGS. 16C and 16D).

[0084] FIG. 17—Detection of bacterial species in prostate tumor whole genome sequencing samples. SEPATH [63] was ran on N=2,176 prostate tumour whole genome sequencing samples from the pan-prostate cancer group (http://panprostate.org). Participants were filtered to those containing followup data (N=818). Participants with evidence for at least one ABBS genera (N=146, blue, as determined by a minimum of 10 taxonomically classified sequencing reads by Kraken for at least one of the genera: Fenollaria, Ezakiella, Peptoniphilus, Porphyromonas, Anaerococcus, Fusobacterium) were compared to those that had no evidence of ABBS genera (N=672, red). There was a statistically significant difference between the groups in terms of relapse-free survival (P=0.023, log-rank test), with the ABBS group demonstrating a poorer prognosis.

### DETAILED DESCRIPTION OF THE INVENTION

[0085] For patients with suspected prostate cancer the risk of over-diagnosis and a lack of prognostic indicators leads to difficulties in clinical decision making where radical surgery or radiotherapy are treatment options for potentially aggressive disease. In this study several separate lines of evidence supportthe role of bacteria as a prognostic marker. First, we demonstrated a significant correlation between risk of prostate cancer progression and the presence of bacteria as determined by the fluorescence microscopic detection of DNA, both in discovery (n=215 patients, P=2.2×10⁻⁶) and validation (n=103, P=4.5×10⁻⁰⁵) datasets. Secondly, Principal Coordinate Analysis of 16S OTU data identified a distinct cluster of patients with higher incidence of metastatic disease. This observation allowed the development of the Anaerobic Bacteria Biomarker Set (ABBS) consisting of 5 genera of strictly anaerobic bacteria (Table 4). Thirdly, application of ABBS to RNAseq libraries prepared from the exosome fraction of urine and to OTU data from the urine sedimentary fraction gave results indicative of the importance of this bacterial group in predicting clinical outcome, although the datasets examined were of modest size and not independent. Next through interrogation of a much larger dataset of Whole Genome DNA Sequence data from prostate cancer (n=204) we were able to confirm the ability of ABBS to predict prostate cancer progression. The combined hazard ratio for all studies using ABBS was: HR 2.93, 95% Cl: 1.43-6. Taken together these studies provided a strong case for a role of bacteria present in the prostate-urine reflux loop in predicting the clinical progression of prostate cancer.

[0086] These observations led to the hypothesis that the bacteria comprising ABBS, associated with aggressive disease, can prosecute a broad range of biological actions that have the potential to co-ordinate and cause cancer progression. Previously inflammation has been strongly linked with progression of PCa [25,26,27], and it has been documented for several cancers that bacterial infection can cause inflammation [36,40]. A review published in 2019 [25], describes the association of the microbiota with prostate pathologies but concluded that major difficulties remain: sampling contamination, obtaining effective control tissue and, with the advent of new sequencing technologies, classifying the often-novel bacteria involved. In this study we used protocols to ensure minimal contamination [70] during the generation of OTU data. We have also grown and whole genome sequenced bacteria leading to the classification of several novel organisms, based on ribosomal protein genes as described by Hug [41].

[0087] The new bacteria were commonly found in urine. This improved characterisation of urine bacteria and development of ABBS allowed us to map the metabolic ability of bacteria associated with prostate cancer progression. Interestingly, we did not find any obvious pro-inflammatory metabolism specific to the ABBS. In a previous study of n=30 patients [42] detected faecal microbiota changes in patients receiving oral androgen receptor axis-targeted therapies compared to control groups, with an increase in bacteria including Akkermansia sp. [76]. In this study we found that several species belonging to the genera associated with poor clinical outcome have predicted components of metabolic pathways that can convert cholesterol to androstenedione (FIG. 4), which if present would negate the impact of the androgen receptor axis-targeted prostate cancer drug abiraterone.

[0088] Recent studies have undertaken comprehensive analyses of microbiomes [43,44] and viromes [45] associated with human cancers. A consistent observation is that microbiomes present in cancer tissue or blood can act as diagnostics markers across multiple cancer types [43,44]. Here we showthatthe microbiome in urine and in cancer tissue can act as a prognostic marker for clinical outcome in prostate cancer. Analyses of published datasets [43,44] indicated that the ABBS bacteria genera we found to be associated with poor prognosis in prostate cancer were also present in other cancer tissue types, hence their relevance in determining aggression may extend beyond prostate cancer. One of these studies [43] additionally reported the association of metabolic functions encoded by bacteria and clinical features including tumour subtypes, smoking status, and the response to immunotherapy. They found that bacteria associated with cancer were intracellular [43], in agreement with observations in this study.

[0089] In some embodiments of the invention, the cancer type can be selected from the list: Acute Lymphoblastic Leukemia (ALL), Acute Myeloid Leukemia (AML), Adrenocortical Carcinoma, Kaposi Sarcoma (Soft Tissue Sarcoma), AIDS-Related Lymphoma (Lymphoma), Primary CNS Lymphoma (Lymphoma), Anal Cancer, Appendix Cancer, Astrocytomas, Atypical Teratoid/Rhabdoid Tumor, Central Nervous System (Brain Cancer), Basal Cell Carcinoma, Bile Duct Cancer, Bladder Cancer, Bone Cancer (includes Ewing Sarcoma and Osteosarcoma and Malignant Fibrous Histiocytoma), Brain Tumors, Breast Cancer, Bronchial Tumors (Lung Cancer), Burkitt Lymphoma—see Non-Hodgkin Lymphoma, Carcinoid Tumor (Gastrointestinal), Cardiac (Heart) Tumors, Medulloblastoma and Other CNS Embryonal Tumors, Germ Cell Tumor, Primary CNS Lymphoma, Cervical Cancer, Cholangiocarcinoma, Chordoma, Chronic Lymphocytic Leukemia (CLL), Chronic Myelogenous Leukemia (CML), Chronic Myeloproliferative Neoplasms, Colorectal Cancer, Craniopharyngioma, Cutaneous T-Cell Lymphoma, Ductal Carcinoma In Situ (DCIS), Embryonal Tumors, Medulloblastoma, Endometrial Cancer, Ependymoma, Esophageal Cancer, Esthesioneuroblastoma (Head and Neck Cancer), Ewing Sarcoma (Bone Cancer), Extracranial Germ Cell Tumor, Extragonadal Germ Cell Tumor, Eye Cancer, Intraocular Melanoma, Retinoblastoma, Fallopian Tube Cancer, Fibrous Histiocytoma of Bone, Malignant, and Osteosarcoma, Gallbladder Cancer, Gastric (Stomach) Cancer, Gastrointestinal Carcinoid Tumor, Gastrointestinal Stromal Tumors (GIST), Germ Cell Tumors, Childhood Extracranial Germ Cell Tumors, Extragonadal Germ Cell Tumors, Ovarian Germ Cell Tumors, Testicular Cancer, Gestational Trophoblastic Disease, Hairy Cell Leukemia, Heart Tumors, Hepatocellular (Liver) Cancer, Histiocytosis, Langerhans Cell, Hodgkin Lymphoma, Hypopharyngeal Cancer (Head and Neck Cancer), Intraocular Melanoma, Islet Cell Tumors, Pancreatic Neuroendocrine Tumors, Kaposi Sarcoma (Soft Tissue Sarcoma), Kidney (Renal Cell) Cancer, Langerhans Cell Histiocytosis, Laryngeal Cancer (Head and Neck Cancer), Leukemia, Lip and Oral Cavity Cancer (Head and Neck Cancer), Liver Cancer, Lung Cancer (Non-Small Cell, Small Cell, Pleuropulmonary Blastoma, and Tracheobronchial Tumor), Lymphoma, Male Breast Cancer, Malignant Fibrous Histiocytoma of Bone and Osteosarcoma, Melanoma, Melanoma, Intraocular (Eye), Merkel Cell Carcinoma (Skin Cancer), Mesothelioma, Metastatic Squamous Neck Cancer with Occult Primary (Head and Neck Cancer), Midline Tract Carcinoma With NUT Gene Changes, Mouth Cancer (Head and Neck Cancer) Multiple Endocrine Neoplasia Syndromes, Multiple Myeloma/Plasma Cell Neoplasms, Mycosis Fungoides (Lymphoma), Myelodysplastic Syndromes, Myelodysplastic/Myeloproliferative Neoplasms, Myelogenous Leukemia, Chronic (CML), Myeloid Leukemia, Acute (AML), Myeloproliferative Neoplasms, Chronic Nasal Cavity and Paranasal Sinus Cancer (Head and Neck Cancer), Nasopharyngeal Cancer (Head and Neck Cancer), Neuroblastoma, Non-Hodgkin Lymphoma, Non-Small Cell Lung Cancer, Oral Cancer, Lip and Oral Cavity Cancer and Oropharyngeal Cancer (Head and Neck Cancer), Osteosarcoma and Undifferentiated Pleomorphic Sarcoma of Bone Treatment, Ovarian Cancer, Pancreatic Cancer, Pancreatic Neuroendocrine Tumors (Islet Cell Tumors), Papillomatosis (Childhood Laryngeal), Paraganglioma, Paranasal Sinus and Nasal Cavity Cancer (Head and Neck Cancer), Parathyroid Cancer, Penile Cancer, Pharyngeal Cancer (Head and Neck Cancer), Pheochromocytoma, Pituitary Tumor, Plasma Cell Neoplasm/Multiple Myeloma, Pleuropulmonary Blastoma (Lung Cancer), Pregnancy and Breast Cancer, Primary Central Nervous System (CNS) Lymphoma, Primary Peritoneal Cancer, Prostate Cancer, Rectal Cancer, Recurrent Cancer, Renal Cell (Kidney) Cancer, Retinoblastoma, Rhabdomyosarcoma, Salivary Gland Cancer, Sarcoma, Childhood Rhabdomyosarcoma (Soft Tissue Sarcoma), Childhood Vascular Tumors (Soft Tissue Sarcoma), Ewing Sarcoma (Bone Cancer), Osteosarcoma (Bone Cancer), Soft Tissue Sarcoma, Uterine Sarcoma, Sezary Syndrome, Skin Cancer, Small Cell Lung Cancer, Small Intestine Cancer, Squamous Cell Carcinoma, Squamous Neck Cancer with Occult Primary, Metastatic (Head and Neck Cancer), Stomach (Gastric) Cancer, T-Cell Lymphoma, Testicular Cancer, Throat Cancer (Head and Neck Cancer), Nasopharyngeal Cancer, Oropharyngeal Cancer, Hypopharyngeal Cancer, Thymoma and Thymic Carcinoma, Thyroid Cancer, Tracheobronchial Tumors (Lung Cancer), Ureter and Renal Pelvis, Transitional Cell Cancer (Kidney (Renal Cell) Cancer, Urethral Cancer, Uterine Cancer, Vaginal Cancer, Vascular Tumors, Vulvar Cancer, Wilms Tumor, Myxofibrosarcoma, Leiomyosarcoma, Pleomorphic Sarcoma and Hepatopancreatobiliary cancer.

[0090] In a preferred embodiment of the invention, the cancer type is prostate cancer.

[0091] To understand the urine and prostate microbiome, we carried out analyses of the bacteria present using 16S amplicon DNA sequencing and anaerobic culture leading to the identification of four novel anaerobic bacteria species and to the characterisation of a set of five bacteria genera (ABBS) associated with aggressive prostate cancer. The use of ABBS predicted rapid development of aggressive disease in three datasets using three distinct technologies with an overall Hazard Ratio (HR) of 2.93, 95% Cl: 1.43-6. The data presented in the current study provide a strong basis for future investigation of carcinogenic mechanisms. Our data are more consistent with a model where a group of strict anaerobic bacteria act together, making the situation more complicated than the established association between H. pylori and gastric cancer. Initial analyses of pathways predicted from bacteria whole genome DNA sequence data have indicated possible mechanisms that can be tested in future studies, including the production of testosterone precursors that may drive cancer growth.

### Active Surveillance

[0092] Active surveillance (AS) is a means of disease-management for men with localised PCa with the intent to intervene if the disease progresses. AS is offered as an option to men whose prostate cancer is thought to have a low risk of causing harm in the absence of treatment. It is a chance to delay or avoid aggressive treatment such as radiotherapy or surgery, and the associated morbidities of these treatments. Entry criteria for men to go on active surveillance varies widely and can include men with Low risk and Intermediate risk prostate cancer.

[0093] Patients on AS are currently monitored by a wide range of means that include, for example, PSA monitoring, biopsy and repeat biopsy and MP-MRI. The timing of repeat biopsies, PSA testing and MP-MRI varies with the hospital, and a widely accepted method for monitoring men on AS has not yet been achieved.

[0094] In some embodiments, active surveillance comprises assessment of a patient by PSA monitoring, biopsy and repeat biopsy and/or imaging techniques such as MRI, for example MP-MRI. In some embodiments, active surveillance comprises assessment of a patient by any means appropriate for diagnosing or prognosing prostate cancer.

[0095] In some embodiments of the invention, active surveillance comprises assessment of a patient at least every 1 month, 2 months, 3 months, 4 months, 5 months, 6 months, 7 months, 8 months, 9 months, 10 months, 11 months or 12 months.

[0096] In some embodiments of the invention, active surveillance comprises assessment of a patient at least every 1 year, 2 years, 3 years, 4 years or 5 or more years.

[0097] In some embodiments of the invention the presence of ABBS bacteria will be used alone or in conjunction with other means of testing to improve shared decision making with the multi-disciplinary team and the patient. The presence or absence of ABBS bacteria could be used to decide whether radical intervention is necessary, to determine whether anti-microbial therapy is required or to decide the optimal time between re-monitoring by, for example, biopsy, PSA testing, or MP-MRI.

### Biological Samples

[0098] In the present invention, the biological sample may be a urine sample, a semen sample, a prostatic exudate sample, or any sample containing macromolecules or cells originating in the prostate, a whole blood sample, a serum sample, saliva, or a biopsy (such as a prostate tissue sample or a tumour sample), although urine samples are particularly useful. The method may include a step of obtaining or providing the biological sample, or alternatively the sample may have already been obtained from a patient, for example in ex vivo methods.

[0099] Biological samples obtained from a patient can be stored until needed. Suitable storage methods include freezing immediately, within 2 hours or up to two weeks after sample collection. Maintenance at −80° C. can be used for long-term storage. Preservative may be added, or the urine collected in a tube containing preservative. Urine plus preservative such as Norgen urine preservative, can be stored between room temperature and −80° C.

[0100] Methods of the invention may comprise steps carried out on biological samples. The biological sample that is analysed may be a urine sample, a semen sample, a prostatic exudate sample, or any sample containing macromolecules or cells originating in the prostate, a whole blood sample, a serum sample, saliva, or a biopsy (such as a prostate tissue sample or a tumour sample). Most commonly for prostate cancer the biological sample is from a prostate biopsy, prostatectomy or TURP. The method may include a step of obtaining or providing the biological sample, or alternatively the sample may have already been obtained from a patient, for example in ex vivo methods. The samples are considered to be representative of the expression status of the relevant genes in the potentially cancerous prostate tissue, or other cells within the prostate, or microvesicles produced by cells within the prostate or blood or immune system. Alternatively, the samples can be considered to be representative of the potentially cancerous microenvironment of the prostate, comprising gene expression or methylation and protein expression. Hence the methods of the present invention may use quantitative data on DNA, RNA, methylation and proteins produced by cells within the prostate and/or the blood system and/or bone marrow in response to cancer, to determine the presence or absence of prostate cancer.

[0101] The methods of the invention may be carried out on one test sample from a patient. Alternatively, a plurality of test samples may be taken from a patient, for example at least 2, 3, 4 or 5 samples. Each sample may be subjected to a separate analysis using a method of the invention, or alternatively multiple samples from a single patient undergoing diagnosis could be included in the method.

[0102] The sample may be processed prior to determining the expression status of the biomarkers. The sample may be subject to enrichment (for example to increase the concentration of the biomarkers being quantified), centrifugation or dilution. In other embodiments, the samples do not undergo any pre-processing and are used unprocessed (such as whole urine).

[0103] In some embodiments of the invention, the biological sample may be fractionated or enriched for DNA prior to detection and quantification (i.e. measurement). The step of fractionation or enrichment can be any suitable pre-processing method step to increase the concentration of DNA in the sample or select for specific sources of DNA such as cells or extracellular vesicles. For example, the steps of fractionation and/or enrichment may comprise centrifugation and/or filtration to remove cells or unwanted analytes from the sample, or to increase the concentration of bacteria in a urine fraction. Methods of the invention may include a step of amplification to increase the amount of DNA that is detected and quantified. Methods of amplification include PCR amplification. Such methods may be used to enrich the sample for any bacteria of interest.

[0104] In some embodiments of the invention, the biological sample may be fractionated or enriched for RNA prior to detection and quantification (i.e. measurement). The step of fractionation or enrichment can be any suitable pre-processing method step to increase the concentration of RNA in the sample or select for specific sources of RNA such as cells or extracellular vesicles. For example, the steps of fractionation and/or enrichment may comprise centrifugation and/or filtration to remove cells or unwanted analytes from the sample, or to increase the concentration of bacteria in a urine fraction. Methods of the invention may include a step of amplification to increase the amount of RNA that is detected and quantified. Methods of amplification include PCR amplification. Such methods may be used to enrich the sample for any bacteria of interest.

[0105] In some embodiments of the invention, the biological sample may be fractionated or enriched for bacterial protein prior to detection and quantification (i.e. measurement). The step of fractionation or enrichment can be any suitable pre-processing method step to increase the concentration of bacterial protein in the sample or select for specific sources of bacterial protein such as cells or extracellular vesicles. For example, the steps of fractionation and/or enrichment may comprise centrifugation and/or filtration to remove cells or unwanted analytes from the sample, or to increase the concentration of bacteria in a urine fraction. Methods of the invention may include a step of amplification to increase the amount of bacterial protein that is detected and quantified. Such methods may be used to enrich the sample for any bacteria of interest.

[0106] Bacterial nucleic acids and/or proteins may be extracted from the biological sample. This can be achieved by a number of suitable methods. For example, extraction may involve separating the bacterial nucleic acids and/or proteins from the biological sample. Methods include chemical extraction and solid-phase extraction (for example on silica columns). Preferred methods of nucleic acid extraction include the use of a silica column. Methods comprise lysing cells or vesicles (if required), addition of a binding solution, centrifugation in a spin column to force the binding solution through a silica gel membrane, optional washing to remove further impurities, and elution of the bacterial nucleic acid and/or protein. Commercial kits are available for such methods, for example from Qiagen or Exigon.

[0107] If bacterial nucleic acids and/or proteins are extracted from a sample, the extracted solution may require enrichment to increase the relative abundance of bacterial nucleic acids and/or proteins transcripts in the sample.

[0108] The methods of the invention may be carried out on one test sample from a patient. Alternatively, a plurality of test samples may be taken from a patient, for example at least 2, at least 3, at least 4 or at least 5 samples. Each sample may be subjected to a single assay to quantify one of the biomarker panel members, or alternatively a sample may be tested for all of the bacteria being detected.

### Methods of the Invention

### Patient Recruitment and Collection of Urine Samples

[0109] Urine samples were collected post-DRE from patients undergoing assessment for prostate cancer or haematuria at the Norfolk and Norwich University Hospital. Ethical approval was obtained from the local research ethics committee (12/EE/0058). Patients were categorised as either normal PSA range for age, raised PSA negative biopsy/raised PSA no biopsy, atypia/High grade prostatic intraepithelial neoplasia (HG-PIN), or cancer risk group (low, intermediate, high) being assigned according to D'Amico criteria based on Gleason score, PSA and clinical stage [5]. Patients were assigned as having advanced disease when PSA>100 ng, with presence of metastases on bone scan or on MRI scan. A summary of the clinical characteristics are shown in Tables 11-14. Following DRE the first 10-25 ml of urine was collected into a sterile 30 ml Universal collection tube (Bibby Sterilin, UK). 300 μl of urine were pipetted onto urine dipsticktest strips (Roche Cobas Combur, Roche Diagnostics, Germany) and the remaining sample was centrifuged at 1200×g for 5 min at 6° C. The urine supernatant was processed and nucleic acids extracted as described by Connell et al [34]. The cell sediment was gently re-suspended in ˜100-200 μl of the supernatant and 80% of the cell pellet volume was aliquoted into PCR grade Eppendorf tubes (Eppendorf, Germany), snap frozen on dry-ice and stored at −80° C. for the later extraction of DNA. The remaining 20% of the urine cell pellet was pipetted onto 2 glass Histobond/SuperFrost slides (Tekdon Inc., USA) and incubated at 4° C. for 30 min to allow cells to bind to the slide. The bulk of the liquid fraction was removed and 50 μl SprayFix cytological fixative (GCC diagnostics, UK) was added to fix material bound to the slide. The slides were allowed to dry at room temperature for 1 hour before storage or preparation for imaging.

### Detection of DNA and Bacteria by DAPI Staining and Microscopy

[0110] Slides containing bound urine cell sediment material were soaked in 70% (v/v) ethanol for 30 min and dried at room temperature. Glass coverslips (18×18 mm, Menzel-Glasser, Germany) were mounted onto the slides with 14 μl Vectashield® plus DAPI diluted 1:4 with Vectashield® mounting media (Vector Laboratories Inc., USA) and the slides stored at 4° C. for at least 30 min prior to fluorescence microscopy imaging using a Leica Ariol 6000B microscope. Slides were scanned with Leica 40× Fluotar objective, fixed exposure 3 colour fluorescence detection with Z-stack settings (7 images at 1.2 μm spacing) for 460 fields of view (FOV). Background DAPI staining indicating the presence of bacterial cell DNA was considered to be present if detected in equivalent to at least >10 full field of view from 460 FOVs screened, and also only if the DAPI staining of bacterial cell DNA was appropriate within the range for the size and morphology of bacteria. Scanning electron microscopy was used on seven samples to further investigate morphological appearances and to obtain accurate size measurements. Slides were coated with 5 nm gold and imaged using a Zeiss Gemini Supra 55 VP SEM and FEI Nova NanoSEM 450 scanning electron microscope. The detection of the morphology and size of the bacteria using SEM (example images in FIG. 1) revealed that the bacteria were pleomorphic, and included visible cocci, diplococci, pleomorphic rods, filament and bacterial aggregates. The cocci sizes ranged from 350-718 nm (mean±SD: 529±89 nm), the diplococci ranged from 538-961 nm (mean±SD: 728±121 nm), the pleomorphic rods width ranged from 194-611 and length ranged from 680-1705 (mean±SD width: 385+128, length: 1127±281 nm). The bacterial filamentous forms were often observed in large bacterial aggregates (aggregate size 50-60 μm, FIG. 5).

DNA Extraction from Urine Sediments and 16S Amplicon DNA Sequencing

[0111] DNA extraction from urine sediment was similar to the protocol of Yu and Morrison, 2004 [46] with repeated bead-beating extraction to maximise recovery of bacterial DNA. Bacteria present were identified by amplification and sequencing of the bacterial 16S rRNA [47]. The primer pairs selected were to the hypervariable regions V1-V3 and V3-V5. Primer sequences were V1-V3: V1F/27F: AGAGTTTGATCMTGGCTCAG (SEQ ID NO:21), V3R/534R: ATTACCGCGGCTGCTGG (SEQ ID NO:22), and V3-V5: V3F/357F: CCTACGGGAGGCAGCAG (SEQ ID NO:23), V5R/926R: CCGTCAATTCMTTTRAGT (SEQ ID NO:24). The PCR reactions were carried out with Accuprime PCR reagents (Invitrogen, UK), primers at 200 nM, with 15 ng DNA template added in a total volume of 25 μl. All of the steps outlined by Salter et al. (2014) [70] including the controls mentioned were incorporated to minimise the possibility of and to check for contamination Controls included no template controls, elution buffer controls and blank bead-beating extraction samples. PCR cycling conditions were: 94° C. 60 sec, followed by 25-30 cycles of 94° C. 30 sec, 57° C. or 50° C. for 10 sec, and 68° C. for 40 sec. 57° C. was used for V1-V3 and 50° C. for V3-V5 primers. Individual barcodes were added to the samples according to a 2-step PCR assay and samples were subject to by 454 pyrosequencing with titanium chemistry, (Beckman Coulter Genomics Washington USA). Mycoplasma hyorhinis was used as a positive control for 16S PCR.

Amplicon Sequencing analysis

[0112] Flow files were generated from the sff files provided by the 454 sequence data provider, using process_sff.py part of QIIME package v1.9.1-2050604. Filtering and denoising of the 454 data was performed by FlowClus v1.1 [48]. Chimera detection was performed by Vsearch v2.4.3 with default parameters during FlowClus pipeline. Vsearch classified chimeric sequences were removed from further analysis. Resulting sequences from three different pools for each primer pair (V1-V3 and V3-V5) were combined in to one dataset for each primer pair. The operational taxonomic units (OTUs) were selected de novo with Uclust [49] using pick_otus.py script from QIIME with similarity 0.99. Most abundant sequences in each cluster were used a representative sequence for OTUs. Representative OTUs were searched against NCBI-nt database (dated 1 Apr. 2017) using blastn program of BLAST+v2.6.0 (parameters: −task ‘blastn’-evalue 1E-10) to remove human contamination. OTUs and respective clusters matching to human with 97 percent identity or higher were removed from downstream analysis. Taxonomy assignments for OTUs were performed using RDP classifier [50] with SILVA release 132 ribosomal RNA database [51] as the reference. Biom files were created using resulting data as described in QIIME with make_otu_table.py. V1V3 and V3V5 data for samples with both datasets were combined to make one table with both abundances for each sample. This combined table is used to estimated alpha and beta diversity analysis using phyloseq v1.24.0 [52] package in R v3.5.0. In addition, various plot and heatmaps were generated in R using following packages ComplexHeatmap v1.18.0, survival v2.42-3, survminer v0.4.2, ggrepel v0.8.0, ggplot2 v 2.2.1, RColorBrewer v1.1-2 and reshape2 v1.4.3.

### Harvest of Prostate Biopsies and Secretion

[0113] Fresh prostate needle biopsies and prostate secretions were harvested within 20 min from whole intact prostate specimens post-prostatectomy while still in theatre using sterile equipment. The prostate was massaged and compressed to expel prostate secretions, which were collected into cryovials. Each prostate yielded around 100-400 μl of secretion. Secretion and tissue samples were transferred immediately to the laboratory for rapid processing and DNA extraction or snap frozen on dry ice and transferred to −80° C. freezer.

### Anaerobic Culturing of Bacteria

[0114] Samples were transferred to a microbiological cabinet supplied with anaerobic gas mixture supply: 5% Hydrogen, 10% CO₂, and 85% Nitrogen at 37° C. Samples taken from urine sediment or prostate secretions were inoculated into pre-reduced PY broth or Brucella blood agar plates with 5% sheep blood and vitamin K1/hemin supplementation (Beckton Dickinson GmbH Heidelberg, Germany) and cultured under anaerobic conditions for up to 7 days. Distinct colonies of each morphology present were picked under anaerobic conditions and cultures prepared for DNA extraction and preparation of frozen stocks. Colony morphology observations are as described in FIG. 8 and FIG. 15. MALDI analysis was via the Bruker MALDI Biotyper, server version 4.1.40 (SIRO) 325 according to manufacturer's instructions. Preparation of fastidious anaerobes onto slides for staining and fluorescence microscopy was as described above for urine sediment fractions.

Quantitative Polymerase Chain Reaction (qPCR)

[0115] Quantitative PCR (qPCR or real-time quantitative PCR—RT-qPCR) is a method to quantify selected polynucleotide sequence by amplifying its initial concentration to a detectable level.

[0116] Real-time quantitative PCR induces amplification of nucleic acid amount in sample. This amplification is strongly non-linear and for simplification considered as exponential in its most progressive phase. The amplification of selected locus of DNA is achieved by repeated cycles of set temperature program that facilitates DNA replication by polymerase enzyme. The locus to be amplified is delimited by pair of primers that anneal to the template by molecular affinity and facilitate polymerization of new strand of DNA from supplied essential nucleotides by polymerase enzyme. Eventually, the finalized double stranded DNA product melts into two single stranded molecules by elevated temperature. To clearly separate and facilitates each of these fundamental steps, temperature regime is controlled and repeated in every cycle by the PCR thermal cycler.

[0117] The fundamental improvement from a qualitative towards quantitative method was facilitated by addition of fluorescence emitting agent into reaction mix whose fluorescence emission can be monitored throughout the reaction progress. Added into reaction, fluorescence emitting agent closely reflects the current concentration of the nucleic acid mass formed cycle by cycle by interacting with it. The signal emitted by interaction of signaling agent with reaction product is monitored once per cycle and when strengthened enough, the cycle number or its fraction is recorded at this threshold. In this way the so-called threshold cycle (Ct) is obtained. To say when the threshold signal of an individual sample has been reached, qualified arbitrary decision is made or a computing procedure is employed.

Detection of Bacterial Species in Clinical Samples Using Species Specific Quantitative PCR (qPCR) Assays

[0118] Quantitative PCR (qPCR) assays were designed and validated to detect bacterial species including the four novel species, Fenollaria sp. nov. (FIG. 12), Varibaculum sp. nov., Peptoniphilus sp. nov., and Porphyromonas sp. nov., plus other target bacteria (Table 7). Primers were designed to unique regions (Table 8), and assays were carried out using a LightCycler® 480 instrument (Roche Diagnostics Ltd) with SYBR Green 1 Master and real-time detection of PCR products. Species specific standards were included for comparison and quantification for each assay in 384 well format (8 μl reaction volume per well). PCR amplicons were checked by melt curve analyses, gel electrophoresis and Sanger sequencing.

### Bacteria Genome Sequencing and Assembly

[0119] Bacterial DNA was extracted from isolated colonies using Qiagen QIAamp columns as described above and prepared for sequencing with Nextera XT library preparation according to manufacturer's instructions. Sequencing was completed on an Illumina MiSEQ instrument using V3 reagents, 600 cycle flow cell with read lengths up to 2×300 bp. MinION nanopore sequencing was carried out as previously described [53] with the following protocol changes, DNA was extracted with Qiagen G-tip protocol to reduce DNA shearing and the library preparation was completed with Oxford Nanopore Technologies Rapid 1 D sequencing library prep kit and sequenced using MinION SpotON Flow cells (R9.4) as per manufacturer's instructions. Sequence read quality was evaluated using FastQC v0.11.5 (https://www.bioinformatics.babraham.ac.uk/projects/fastqc/). Based on the information from FastQC report, sequence reads were trimmed for low quality and filtered for adapter contamination using Trimmomatic v0.36 [54] and reads less than 35 nucleotides were discarded. Resulting paired and single end reads were used for genome assembly using SPAdes v3.9.0 [55] using multi k-mer approach with parameters ‘-k 21,33,55,77,99,127-careful’. Resulting assembly is filtered by removing contigs less than 500 bp and contigs with mean coverage less than ⅓rd of mean genome coverage. Resulting assembly is evaluated for completeness by BUSCO [56] analysis pipeline. Genomes with more than 90% completeness based on BUSCO analysis were used for downstream analysis by performing de novo annotation with Prokka v1.11 with arguments ‘-kingdom Bacteria—mincontiglen 300-addgenes [57].

### Metabolic Pathway Searching

[0120] Predicted protein sequences from Prokka annotation were searched against InterPro protein signature databases using InterProScan REST api v5.29-68.0 [58]. Analysis was primarily focussed on retrieving GO, KEGG, Reactome and Metacyc pathway information for each protein.

### Phylogenetic Analysis

[0121] Protein sequences of 16 ribosomal proteins (S3, S8, S10, S17, S19, L2, L3, L4, L5, L6, L14, L15, L16, L18, L22 and L24) were downloaded from NCBI (https://www.ncbi.nlm.nih.gov/) for 1500 selected bacterial genomes. Selected 16 ribosomal protein sequences from assembled bacterial isolates (n=46) from the current study were combined. A concatenated ribosomal protein alignment was constructed by individually aligning each of the ribosomal protein using MAFFT v7.309 [59]. Each ribosomal protein multiple sequence alignments were trimmed to remove poorly aligned regions using trimAl v1.4.rev15 [60]. Resulting 16 trimmed alignments were concatenated to form a final alignment comprising of 383 bacterial genomes and 2382 amino-acid positions. Concatenated proteins alignments were used to generate a maximum likelihood tree with RAxML v8.2.9 [61] with PROTGAMMALG as model parameter, and with 100 bootstrap replicates conducted with the rapid bootstrapping algorithm (raxmlHPC-PTHREADS-AVX-T 16-f a-x 88-m PROTGAMMALG-p 117-N 100). Phylogenetic tree and clade diagrams were generated using ggtree v1.12.0 in R v3.5.0.

[0122] The 16S sequences of the novel isolates were checked by running updated BLAST searches (last accessed September 2020), we noted that our isolated Fenollaria sporofastidiosus sp. nov. isolates demonstrated a high similarity to entry Accession: CP027242.1 ‘Peptostreptococcaceae bacterium oral taxon 929 strain W2294’. OrthoANI [62] was used to calculate the average nucleotide identity between the whole genome sequence of our isolates and closely related species. Strain W2294 was only 85.04% and 85.35% similar to our Fenollaria sporofastidiosus sp. nov. isolates. Even though the 16S sequence was highly similar, the whole genome sequence data and other analyses indicate that Fenollaria sporofastidiosus sp. nov. is a novel species.

### Searching for Pathogens in ICGC Datasets

[0123] Unmapped reads from human aligned BAM files of 227 (n=204 with clinical follow up, Table 14) ICGC patient blood and prostate tissue sequencing data were classified. A curated Burrow-Wheeler Aligner (BWA) alignment database was setup using 75 genomes that comprised isolates cultured and assembled in the current study, in addition to strains frequently identified by a Kraken analysis along with human genome reference GRCh38 (Table 15—list of genomes used). Reads were selected for downstream analysis, from BWA alignments, with a mapping quality of 20 (99.9% probability that read comes from aligned genome). Alignments>=50 bp are used for downstream analysis and allowed one gap. Sequences from these aligned regions of the genome were extracted and low complexity regions filtered using dustmasker from BLAST+v2.6.0. Sequences with >50 bp of usable sequence after complexity masking were blasted against NCBI-nt database (dated 1 Apr. 2017). Selected regions matching human and related primates from Hominidae were discarded. Selected regions matching respective genera or uncultured sequence or missing taxa name were used for downstream analysis. Assemblies with >200 bp of their genome covered from this analysis were marked as present in the sample.

### RNA Sequencing Metatranscriptomics

[0124] SEPATH [63] using Kraken was used to analyse RNA sequencing data (trimming parameters: minimum base quality=25, sliding window=4, minimum read length=35). Human read depletion was carried out using a database consisting of GRCh38 human reference including decoys. All other parameters were as standard. The Kraken database used was a custom-built database containing all genomes on NCBI RefSeq above scaffold level assembly. Kraken reports were analysed with R (v3.5.3), classifications<100 reads assigned to any given clade were set to zero to limit false positive classification. To help address the issue of contamination, any genera suggested as a potential contaminant by Salter et al. 2014 [70] was removed. The community matrix was transformed to presence/absence by using the decostand function (‘vegan’ R package).

### Survival Analysis

[0125] Survminer (R package) was used to produce survival curves using default parameters (log-rank test). Taxa were declared as positive for RNA seq and ICGC approach as outlined in previous sections. A minimum relative abundance of 5% was applied to 16s taxa. Progression events were determined by the earliest of the following: appearance of prostate cancer associated metastases on imaging, an increase in histological staging, prostate cancer associated death or an increase in plasma PSA sufficient to affect the course of clinical treatment. Incidents that were not considered progression events include: development of a secondary tumour, non-prostate cancer associated death or a radical prostatectomy. Univariate Cox proportional hazards models were fitted with the coxph function (survival package). A random-effect meta-analysis based on log hazard ratios and their 95% confidence intervals was carried out with the metagen function (meta package) for three technologies: 16S, RNAseq, ICGC.

### Bacteria Novel Species New Proposed Names and Accession IDs

[0126] The new bacteria species were named according to the code and guidance presented in ref [64]. Fenollaria sp. nov., new proposed name: Fenollaria sporofastidiosus sp. nov. (sporofastidiosus, sporo spore-forming and fastidiosus in honour of Dr Sidney Finegold who proposed this name by e-mail communication, in relation to fastidious growth requirements). Varibaculum sp. nov., new proposed name: Varibaculum prostatecancerukia sp. nov. (prostatecancerukia, in thanks to the charity Prostate Cancer UK). Peptoniphilus sp. nov., new proposed name: Peptoniphilus rachelemmaiella sp. nov., in relation to two authors who contributed to the anaerobic bacteria culture and knowledge. Plus also Porphyromonas sp. nov., new proposed name: Porphyromonas bobii sp. nov. (bobii, in honour of Bob Champion and the Bob Champion Cancer Trust who have contributed so much to research on prostate cancer). Further descriptions of the novel species and other relevant details are presented in Table 3, FIG. 8 and FIG. 15. The novel bacterial isolates assembled genome sequence data have been deposited in the European Nucleotide Archive, with the following details:

TABLE 1
Sequence deposit details of new bacterial strains

| Primary Accession | Secondary Accession | Title | Tax ID | Scientific Name |
|---|---|---|---|---|
| ERS5804568 | SAMEA8117585 | Varibaculum | 2811781 | Varibaculum sp. |
| (SEQ ID NO: 25) | | prostatecancerukia | | EMRHCC_39 |
| ERS5804567 | SAMEA8117584 | Fenollaria | 2811778 | Fenollaria sp. |
| (SEQ ID NO: 26) | | sporofastidiosus | | EMRHCC_24 |
| ERS5804566 | SAMEA8117583 | Peptoniphilus | 2811779 | Peptoniphilus sp. |
| (SEQ ID NOs: 27-67) | | rachelemmaiella | | EMRHCC_23 |
| ERS5804565 | SAMEA8117582 | Porphyromonas | 2811780 | Porphyromonas sp. |
| (SEQ ID NOs: 68-84) | | bobii | | EMRHCC_6C |

[0127] New bacteria species have been deposited in the National Collection of Type Cultures, ECACC and Leibniz Institut Deutsche Sammlung von Mikroorganismen und Zellkulturen (DSMZ) with the following details:

TABLE 2
Biological deposit details of new bacterial strains

| | | Provisional | |
|---|---|---|---|
| | | ECACC | DSMZ |
| | | Accession | Accession |
| Title | Scientific Name | Number | Number |
| Varibaculum | Varibaculum sp. | 21092203 | DSM 34057 |
| prostatecancerukia | EMRHCC_39 | | |
| Fenollaria | Fenollaria sp. | 21092201 | DSM 34056 |
| sporofastidiosus | EMRHCC_24 | | |
| Peptoniphilus | Peptoniphilus sp. | 21092202 | DSM 34055 |
| rachelemmaiella | EMRHCC_23 | | |
| Porphyromonas | Porphyromonas sp. | 21092204 | DSM 34063 |
| bobii | EMRHCC_6C | | |

[0128] Four biological deposits were made with the European Collection of Cell Cultures (ECACC), Culture Collections, Public Health England, Porton Down, Salisbury, Wiltshire, SP4 0JG, United Kingdom (accession numbers 21092201, 21092202, 21092203 and 21092204) on 22 Sep. 2021. Four biological deposits were made with the Leibniz Institute DSMZ-German Collection of Microorganisms and Cell Cultures, Inhoffenstr. 7B, D-38124, Braunschweig, Germany (accession numbers 34056, 34055, 34063 and 34057) on 23 Sep. 2021.

[0129] The sequence assemblies for Varibaculum prostatecancerukia and Fenollaria sporofastidiosus (SEQ ID NOs:25 and 26) contain contiguous sequences assembled from short reads (sometimes with additional long read sequencing). Sometimes it is not possible (and/or not desirable) to assemble a bacterial genome into one single long contiguous sequence. The sequence assemblies for Peptoniphilus rachelemmaiella and Porphyromonas bobii (SEQ ID NOs:27-84) contain multiple contigs ordered from largest to smallest for each bacterium. Any part of the bacterial genome which is susceptible to detection via PCR techniques may be useful for identifying and/or detecting the presence of bacteria in a biological sample.

[0130] An overview flow chart of the analyses in this study highlighting the identification of ABBS and novel species are shown in FIG. 13.

[0131] Steps taken for minimising and assessing contamination according to RIDE criteria (Report, Include, Determine, Explore criteria checklist).

### Sample Collection and Processing

[0132] The experimental design was established to reduce the potential for microbial contamination. Tissue biopsies and prostate fluid secretions were collected from excised prostates post-prostatectomy whilst still in the operating theatre using sterile equipment. Where possible all samples were processed within a clean microbiological safety cabinet. The picking of pure colonies from cultures was completed in a HEPA filtered anaerobic cabinet with sterile equipment (Don Whitley Scientific, UK).

[0133] Steps taken to reduce contamination in the urine sediment 16S sequencing data and qPCR datasets: 16S amplicon sequencing protocol utilised Mycoplasma hyorhinis as a positive control and several negative control samples (no template controls, elution buffer controls and blank bead-beating extraction samples). One negative control sample (V1V3, ID: M93.L) contained 99.96% relative abundance of Mycoplasma, 0.014% Ralstonia, 0.007% Achromobacter, 0.007% Pelomonas, 0.007% Undibacterium. Ralstonia and Undibacterium classifications from V1V3 16S were present in some samples in the rest of the dataset. Ralstonia was in 22 samples (median 0.135%, IQR 0.23%, maximum 3.3%). Undibacterium was present in 19 samples (median 0%, IQR 0.61%, maximum 0.99%). Classifications obtained in negative controls are therefore unlikely to have a significant impact on overall community structure or on genera in the ABBS list. Regarding the qPCR assays, species specific standards were included for quantification of the species-specific qPCR assays in a 384 well format. PCR amplicons were checked by melt curve analyses, gel electrophoresis and additional Sanger sequencing.

[0134] Sequence data analysis, RNAseq and whole genome sequence data consideration of contamination: The taxonomy of isolates was investigated by several approaches including MALDI, BLAST searches of 16S sequences, pro-genomes classifier (data not shown), 16S protein phylogenetics and completeness was examined with BUSCO. One isolate appeared mixed (strain 02_15) which was suspected in part to be Fusobacterium nucleatum. This strain was excluded from any additional analysis. RNA sequencing of urine extracellular samples and ICGC WGS samples were not sequenced locally and not necessarily designed for microbial detection, (except sterile molecular biology grade reagents and equipment were used for RNA extraction). For these cohorts, no negative control samples were sequenced and so we are unable to comment in this regard. The sample-genus community matrix from RNA sequencing was filtered for a minimum of 100 classified reads to help limit the prevalence of contamination/false positive results. Additionally, all common contaminant genera in negative controls suggested by Salter et al. 2014 [70] were removed from analysis. This is with the caveat that this list also includes some biologically relevant bacterial genera such as Escherichia. Opposingly, some contaminant genera likely remain in the community matrix such as Agrobacterium which is a suspected contaminant (or a false positive result) because it is frequently identified in soil and is a known plant pathogen [65] with limited documentation as a widespread human commensal/pathogen. The extraction and application of ABBS genera helps to remove the potential for taxa such as Agrobacterium to impact results.

[0135] The ICGC prostate tissue WGS data targeted alignment approach was developed with contamination in mind. As well as including in-house isolates isolated from the prostate, we also included reference genomes including some prevalent contaminants as indicated by Salter et al. 2014 [70] that we frequently noted including: Stenotrophomonas, Ralstonia, Escherichia and Toxoplasma to name a few. Additionally, sequences were dustmasked to remove low complexity and regions matching human and related primates from homindae were removed to help limit false positive classifications from human sequences.

[0136] Many of the ABBS genera (Fenollaria, Ezakiella, Peptoniphilus, Porphyromonas, Anaerococcus, and Fusobacterium), originally defined based on the 16S urine community analysis (higher median relative abundance>2% in cluster 1 compared to the rest of the dataset and p<0.1, Table 9) contain well documented human pathogens. Furthermore, other studies have documented the presence of Peptoniphilus, Porphyromonas, Anaerococcus, and Fusobacterium in urine (reviewed in [66]) which might diminish the likelihood that any of them are contaminant genera. A recent meta-analysis suggests that Fusobacterium, Anaerococcus and Porphyromonas can occur in negative control samples [67]. However, these three genera are also documented human pathogens/commensals [68,69]. Of the ABBS positive samples with prostate cancer in the RNA sequencing dataset: 14% were positive for Ezakiella, 64% positive for Peptoniphilus, 36% positive for Porphyromonas, 57% positive for Anaerococcus, 57% positive for Fusobacterium. Therefore Fusobacterium, Anaerococcus and Porphyromonas have a high prevalence in ABBS positive samples. We have obtained pure cultures of many of the ABBS genera which indicates that they are present and viable in clinical samples and thus not contamination or hits from sequences in the ‘kitome’. It is reassuring that the trend with survival as shown in this study is replicated by distinct approaches that are considerate of contamination.

### Biopsies

[0137] A prostate biopsy involves taking a sample of the prostate tissue, for example by using thin needles to take small samples of tissue from the prostate. The tissue is then examined under a microscope to check for cancer.

[0138] There are two main types of prostate biopsy—a TRUS (trans-rectal ultrasound) guided or transrectal biopsy, and a template (transperineal) biopsy. TRUS biopsy involves insertion of an ultrasound probe into the rectum and scanning the prostate in order to guide where to extract the cells from. Normally 10 to 12 small pieces of tissue are taken from different areas of the prostate.

[0139] A template biopsy involves inserting the biopsy needle into the prostate through the skin between the testicles and the rectum (the perineum). The needle is inserted through a grid (template). A template biopsy takes more tissue samples from more areas of the prostate than a TRUS biopsy. The number of samples taken will vary but can be around 20 to 50 from different areas of the prostate.

### Prostate Cancer Treatment

[0140] Patients with metastatic disease are primarily treated with hormone deprivation therapy. However, the cancer invariably becomes resistant to treatment leading to disease progression and eventually death. Treatment of patients with metastatic prostate cancer is clinically very challenging for a number of reasons, which include: i) the variability in patient response to hormone treatment (i.e. time prior to relapse and becoming castrate resistant), ii) the detrimental effects of hormone manipulation therapy on patients and iii) the myriad new treatment options available for castrate resistant patients. In some cases, treatment of prostate cancer can be placing the patient under active surveillance.

[0141] The response to hormone manipulation/ablation therapy is highly variable. Some men fail to respond to treatment while others relapse early (i.e. within 6 months), the majority relapse within 18 months (late relapse) and the rest respond well to the treatment often taking several years before relapsing (delayed relapse). Early identification of patients who will have a poor response will provide a clinical opportunity to offer them a different treatment approach that may perhaps improve their prognosis. However, there is no means currently to identify such patients except for when they exhibit biochemical progression with rising PSA level (e.g. serum PSA level), or become clinically symptomatic, in which case they get offered a different treatment strategy. This regime however goes hand in hand with a number of detrimental effects such as bone loss, increased obesity, decreased insulin sensitivity increasing the incidence of diabetes, adversely altered lipid profiles leading to cardiovascular disease and an increased rate of heart attacks. For these reasons offering hormone manipulation requires a lot of clinical consideration particularly as most of the patients requiring such treatment are elderly patients and such treatment could overall be detrimental rather than beneficial.

[0142] Due to ever-emerging new treatments or second line therapies for patients with advanced metastatic cancer in the past decade, the treatment of men with castrate resistant prostate cancer is dramatically changing. Prior to 2004, the only treatment option for these patients was medical or surgical castration then palliation. Since then several chemotherapy treatments have emerged starting with docetaxel, which has shown to improve survival for some patients. This was followed by five additional agents (FDA-approved) including new hormonal agents targeting the androgen receptor (AR) such as the AR antagonist Enzalutamide, agents to inhibit androgen biosynthesis such as Abiraterone, two agents designed specifically to affect the androgen axis, sipuleucel-T, which stimulates the immune system, cabazitaxel chemotherapeutic agent and radium-223, a radionuclide therapy. Other treatments include targeted therapies such as the PI3K inhibitor BKM120 and an Akt inhibitor AZD5363. Therefore, it is crucially important to be able to identify patients that would benefit from these treatments and those that will not. Identification of prognostic indicators capable of predicting response to hormone manipulation and to the above list of alternative treatments is very important and would have great clinical impact in managing these patients. In addition, the only current clinically available means to diagnose metastasis is by imaging. Markers that are being put forward include circulating tumour cells and urine bone degradation markers. A test for metastasis per se could radically alter patient treatment.

[0143] Prostate cancers can be staged according to how advanced they are. This is based on the TMN scoring as well as any other factors, such as the Gleason score and/or the PSA test. The staging can be defined as follows:

### Stage I:

[0144] T1, N0, M0, Gleason score 6 or less, PSA less than 10
[0145] OR
[0146] T2a, N0, M0, Gleason score 6 or less, PSA less than 10

### Stage IIA:

[0147] T1, N0, M0, Gleason score of 7, PSA less than 20
[0148] OR
[0149] T1, N0, M0, Gleason score of 6 or less, PSA at least 10 but less than 20:
[0150] OR
[0151] T2a or T2b, N0, M0, Gleason score of 7 or less, PSA less than 20

### Stage IIB:

[0152] T2c, N0, M0, any Gleason score, any PSA
[0153] OR
[0154] T1 or T2, N0, M0, any Gleason score, PSA of 20 or more:
[0155] OR
[0156] T1 or T2, N0, M0, Gleason score of 8 or higher, any PSA

### Stage III:

[0157] T3, N0, M0, any Gleason score, any PSA

### Stage IV:

[0158] T4, N0, M0, any Gleason score, any PSA
[0159] OR
[0160] Any T, N1, M0, any Gleason score, any PSA:
[0161] OR
[0162] Any T, any N, M1, any Gleason score, any PSA

[0163] In the present invention, an aggressive cancer is defined functionally or clinically: namely a cancer that can progress. This can be measured by PSA failure. When a patient has surgery or radiation therapy, the prostate cells are killed or removed. Since PSA is only made by prostate cells the PSA level in the patient's blood reduces to a very low or undetectable amount. If the cancer starts to recur, the PSA level increases and becomes detectable again. This is referred to as “PSA failure”. An alternative measure is the presence of metastases or death as endpoints.

[0164] Prostate cancer can be scored using the Prostate Imaging Reporting and Data System (PI-RADS) grading system designed to standardise non-invasive MRI and related image acquisition and reporting, potentially useful in the initial assessment of the risk of clinically significant prostate cancer. A PI-RADS score is given according to each variable parameter. The scale is based on a score “Yes” or “No” for Dynamic Contrast-Enhanced (DCE) parameter, and from 1 to 5 for T2-weighted (T2W) and Diffusion-weighted imaging (DWI). The score is given for each lesion, with 1 being most probably benign and 5 being highly suspicious of malignancy:
[0165] PI-RADS 1: very low (clinically significant cancer is highly unlikely to be present)
[0166] PI-RADS 2: low (clinically significant cancer is unlikely to be present)
[0167] PI-RADS 3: intermediate (the presence of clinically significant cancer is equivocal)
[0168] PI-RADS 4: high (clinically significant cancer is likely to be present)
[0169] PI-RADS 5: very high (clinically significant cancer is highly likely to be present)

[0170] Increase in Gleason score, stage as defined above or PI-RADS grade can also be considered as progression. However, the presence or absence of ABBS bacteria is independent of Gleason, stage and PI-RADS. It provides additional information about the development of aggressive cancer in addition to Gleason, stage and PI-RADS. It is therefore a useful independent predictor of outcome. Nevertheless, the presence or absence of ABBS bacteria can be combined with Gleason, tumour stage and/or PI-RADS score. FIG. 14 shows data demonstrating the association of presence of bacteria in urine sediment with prostate cancer clinical grade, stage and PSA.

[0171] In some methods of the invention the identification of ABBS bacteria can be used alongside MRI to aid decision making on whether to biopsy or not, particularly in men with PI-RADS 3 and 4. The presence of ABBS bacteria could also be used to confirm the absence of clinically significant prostate cancer in men with PI-RADS 1 and 2.

[0172] By “clinical outcome” it is meant that for each patient whether the cancer has progressed. For example, as part of an initial assessment, those patients may have prostate specific antigen (PSA) levels monitored. When it rises above a specific level, this is indicative of relapse and hence disease progression. Histopathological diagnosis may also be used. Spread to lymph nodes, and metastasis can also be used, as well as death of the patient from the cancer (or simply death of the patient in general) to define the clinical endpoint. Gleason scoring, cancer staging and multiple biopsies (such as those obtained using a coring method involving hollow needles to obtain samples) can be used. Clinical outcomes may also be assessed after treatment for prostate cancer. This is what happens to the patient in the long term. Usually the patient will be treated radically (prostatectomy, radiotherapy) to effectively remove or kill the prostate. The presence of a relapse or a subsequent rise in PSA level (e.g. serum PSA level) (known as PSAfailure) is indicative of progressed cancer.

[0173] Accordingly, any of the methods of the invention may be carried out in patients in whom prostate cancer is suspected. Importantly, the present invention allows a prediction of cancer progression before treatment of cancer is provided. This is particularly important for prostate cancer, since many patients will undergo unnecessary treatment for prostate cancer when the cancer would not have progressed even without treatment.

[0174] Proteins can also be used to determine expression status, and suitable methods to determine expressed protein levels are known to the skilled person.

[0175] The present invention shall now be further described with reference to the following examples, which are present for the purposes of illustration only and are not to be construed as being limiting on the invention.

### EXAMPLES

### Example 1—Bacteria in Urine are Associated with Disease Progression Risk in Prostate Cancer

[0176] Examination of post-Digital Rectal Examination (DRE) urine sediments revealed background DNA staining suggestive of bacteria in ˜50% samples, which was also supported by scanning electron microscopy (FIGS. 1 A and B, FIG. 5). To test the importance of this observation we analysed urine samples from men undergoing assessment for prostate cancer (n=300) or from a haematuria clinic (n=18). Background DNA staining corresponding to bacteria was more common from men with D'Amico high risk or advanced prostate cancer (FIG. 1C) with a significant positive trend linking the presence of bacteria to a higher risk of disease progression. In the discovery set of 215 samples a chi-squared test for trend in proportions gave a strong association (P=2.2×10⁻⁶) which was confirmed in the validation set of 103 (P=4.5×10⁻⁵), and bacteria were also observed in much larger aggregates (FIGS. 5 A and B). For the combined data set the proportion of patients with these aggregates in their urine (FIG. 5) was also significantly linked (P=0.006; FIG. 5C) to prostate cancer risk of progression. The bacteria also appeared in some cases to be intracellular within human cells (FIG. 6). We concluded that the presence of bacteria in urine cell sediment was correlated with cancer having higher risk of disease progression and may represent a useful prognostic indicator.

### Example 2—Culture Confirms New Species of Bacteria from the Urine of Prostate Cancer Patients

[0177] To identify the bacteria involved, we initially used a standard 16S sequencing approach using accepted protocols and controls to avoid contamination [70,71]. The bacterial community structure, identified using 16S rRNA amplicon pyrosequencing on urine sediments from 46 men (24 with a diagnosis of prostate cancer), revealed 1614 bacterial operational taxonomic units (OTUs). There was no clear association between the number of OTUs detected and prostate cancer progression risk: an average of 168 OTUs (range: 64-265) in samples from non-cancer patients; 130 OTUs (range: 67-237) in samples from D'Amico low/intermediate risk prostate cancer and 171 OTUs (range: 81-290) in samples from high risk and advanced. During these analyses however, we observed many OTUs that lacked assignment at deeper than genus level and some that were assigned only at family level. To explore this result, we performed direct searches of unassigned OTU sequences against the NCBI dataset but again found no exact matches. We concluded that the post-DRE urine contained novel bacterial species that have not yet been cultured and characterised and so we attempted to culture them.

[0178] We applied a fastidious anaerobic culture protocol for culturing bacteria previously considered to be “unculturable” [72] to post-DRE urine sediments and also to prostate cancer secretions and biopsies obtained after prostatectomy. Strict anaerobic culture protocols yielded 39 bacterial isolates from post-DRE urine (FIG. 15) and 8 isolated from prostate cancer secretions. Whole genome sequencing (Illumina sequencing for all n=47 isolates and Oxford Nanopore Technologies hybrid assemblies for candidate novel species) resulted in high quality genomes contigs (1 to 515 per bacteria isolated). Most of the anaerobic bacterial isolates from post-DRE urine sediments were from the phyla Firmicutes, class Clostridia, including genera Peptoniphilus, Fenollaria and Anaerococcus (FIG. 15). Sixteen isolates of Propionimicrobium lymphophilium from three different urine samples demonstrated considerable genetic variation (FIG. 8). Prostate secretions yielded bacteria from the genera Porphyromonas, Staphylococcus, Streptococcus and Cutibacterium (FIG. 15).

[0179] Higher-resolution phylogenetic analysis was obtained by aligning selected full-length ribosomal protein gene sequences from the unclassified isolates to the same genes from known bacterial species [41], (FIG. 2a). This allowed us to identify four novel species (Table 3). The novel species, defined as sequence similarity less than 97% to the closest published assemblies [73], were from the phyla Firmicutes, (Fenollaria sp. nov. and Peptoniphilus sp.nov.), Actinobacteria (Varibaculum sp. nov.) and Bacteroidetes (Porphyromonas sp. nov.). Further details on novel species and isolates are in FIG. 8 A-D and Table 6.

TABLE 3
Novel bacteria species isolated. Novel species isolated from clinical samples, including
taxonomy and proposed new species name

| Novel Species | Novel species | Novel species | Novel species | Reference Strain |
|---|---|---|---|---|
| Isolated Bacteria | belonging to | belonging to | belonging to | ID new proposed |
| ID | Phyla | Class | Genus | name |
| Fenollaria sp. nov. | Firmicutes | Clostridia | Fenollaria | Fenollaria |
| | | | | sporofastidiosus sp. |
| | | | | nov. |
| Peptoniphilus sp. | Firmicutes | Clostridia | Peptoniphilus | Peptoniphilus |
| nov. | | | | rachelemmaiella sp. |
| | | | | nov. |
| Varibaculum sp. | Actinobacteria | Actinobacteria | Varibaculum | Varibaculum |
| nov. | | | | prostatecancerukia |
| | | | | sp. nov. |
| Porphyromonas | Bacteroidetes | Bacteroidia | Porphyromonas | Porphyromonas |
| sp. nov. | | | | bobii sp. nov. |

[0180] We confirmed the presence of all four novel species in urine cell sediment samples with in-house designed specific qPCR assays (6 to 65% of samples, Tables 7 and 8). Two of the novel species (Peptoniphilus sp. nov., Varibaculum sp. nov.) were also detected by qPCR in prostate tissue (2.8 to 8.6%) and all four novel species in prostate secretions (2.8 to 17%) consistent with a prostate-urine reflux loop where there is an exchange of bacteria between the urine and prostate.

### Example 3—Taxonomic Resolution Allows the Identification of Bacterial Genera Potentially Associated with Disease Progression

[0181] Having identified the putative novel species, we linked them to the identified 16S OTUs. Clustering on the relative abundance of the 16S OTUs, using Principal Coordinate Analysis (PCoA), allowed us to associate bacterial communities with disease state (FIG. 3). With OTU data from 46 men three main clusters (using Manhattan distance and k-means clustering) were observed (FIGS. 3 A and B and FIG. 9) explaining 48.9% of variance within the first three principal coordinates (FIG. 3A and FIG. 9 A-C). Patients demonstrating elevated rates of metastases were overrepresented in Cluster 1 (FIG. 3A, stars) compared to the other two clusters (P=0.015; log-rank test. FIG. 3C).

[0182] To identify bacterial genera associated with cluster 1 (metastatic group) that could potentially be used as prostate cancer biomarkers, we investigated differences in relative abundance between cluster 1 and the remainder of the dataset (FIG. 9D, Table 9). The genera selected for further study, based on statistical significance and fold difference, were the strict anaerobes Fenollaria/Ezakiella, Peptoniphilus, Porphyromonas and Anaerococcus. Fusobacterium, another anaerobe detected in the 16S data from microscopy positive samples, was also included due to rapidly growing evidence of its association with the development of a range of cancers [74,75]. Co-occurrence plots of the bacteria genera identified from the urine sediment 16S data demonstrated that several of these strict anaerobes are commonly found together in high risk and advanced/metastatic disease (FIG. 11). The five selected bacteria genera (Table 4, Table 10) are referred to as the ABBS (Anaerobic Bacteria Biomarker Set).

TABLE 4
Anaerobic Bacteria Biomarker Set (ABBS). Bacteria associated with a poor prognosis.
ABBS bacteria taxonomy, novel species isolated in this study ( [symbol] )

| Anaerobic | | | | |
|---|---|---|---|---|
| Bacteria | | | | Novel Species and known |
| Biomarker Set: | ABBS | ABBS | ABBS | species isolated by |
| ABBS bacteria | belonging to | belonging to | belonging to | anaerobic culture belonging |
| genera | Phylum | Class | Order | to ABBS genera |
| Fenollaria | Firmicutes | Clostridia | Clostridiales | Fenollaria sp. nov. [symbol] |
| | | | | (Fenollaria sporofastidiosus) |
| Peptoniphilus | Firmicutes | Clostridia | Clostridiales | Peptoniphilus sp. nov. [symbol] ; |
| | | | | (Peptoniphilus |
| | | | | rachelemmaiella) |
| | | | | Peptoniphilus harei |
| Anaerococcus | Firmicutes | Clostridia | Clostridiales | Anaerococcus prevotii |
| Porphyromonas | Bacteroidetes | Bacteroidia | Bacteroidales | Porphyromonas sp. nov. [symbol] ; |
| | | | | (Porphyromonas bobii), |
| | | | | Porphyromonas |
| | | | | asaccharolytica |
| Fusobacterium | Fusobacteria | Fusobacteriia | Fusobacteriales | Fusobacterium nucleatum |

### Example 4—Use of the Anaerobic Bacteria Biomarker Set from the Prostate-Urine Reflux Loop as a Prognostic Biomarker

[0183] Processing of urine samples generates the sedimentary faction that was used to detect bacterial DNA fluorescence staining and generate OTU data as described above, and a supernatant fraction that contains prostate derived exosomes. To establish a relationship between the ABBS and cancers that progress clinically we examined both of these fractions. First, using the 16S OTU data (n=24) from urine sediments. Second, using RNA sequencing data from urine exosome supernatant fractions (n=24). Both technologies demonstrated more rapid clinical progression for men when at least one of the ABBS bacteria genera were detected (FIGS. 3 D and E). These two sample sets had six urine samples in common so were not entirely independent.

[0184] To validate these indicative results, we examined a much larger and entirely independent prostate cancer tissue dataset from the International Cancer Genome Consortium (ICGC) for association of bacterial genera with prostate cancer progression. Although this is human cancer genome data, bacterial DNA is concomitantly sequenced if present in the DNA sample extracted from the prostate cancer tissue. Interrogating data for 204 samples (FIG. 3F) indicated a significantly high rate of clinical progression in donors with at least one of the anaerobic bacterial genera detected, with a hazard ratio of 2.07 (95% Cl: 1.04-4.15). Combining the three sets of data in a meta-analysis gave a hazard ratio of 2.93 (95% Cl: 1.43-6; Cox proportional hazards regression; FIG. 10) for disease progression. These results led us to believe that detecting the presence of anaerobic bacteria that comprise the ABBS in the urinary tract may constitute a prognostic test for the risk of clinical progression in prostate cancer patients. The possibility that these anaerobic bacteria are not only indicative of cancer progression but associated with cancer development and progression was then investigated.

### Example 5—Investigating the Mechanism of Action

[0185] We next used whole genome DNA sequence data from bacteria present in the urine and prostate to predict the presence of genes and functional pathways. These studies add to previous studies on prostate cancer that have investigated the association between the presence of microorganisms and inflammation [27,76], and identify a variety of specific molecular mechanisms [39] that are of potential interest for tumour progression and for therapeutic exploitation. Genera within ABBS were predicted to encode components of metabolic pathways that can convert cholesterol to androstenedione (FIG. 4), an immediate precursor for testosterone that is required for prostate cancer growth [77]. This pathway was not present non-ABBS isolates (FIG. 4) The presence of ABBS bacteria could also help explain why prostate cancer patients develop resistance to the drug abiraterone, which completely abates eukaryotic testosterone synthesis through irreversible inhibition of the enzyme CYP17 [77], the eukaryotic enzyme responsible for androstenedione production. Development of drugs that target these bacterial pathways or eradicate the pathogens could remove the bacterial source of androstenedione and improve survival.

[0186] Thymidylate synthase (TS) was a common pathway across all bacteria with a skew towards flavin-dependent (FAD) bacterial specific TS activity in ABBS genera (FIG. 4). We note that TS overexpression has been demonstrated as a prognostic marker for aggressive prostate cancer [78] and that TS upregulation in cancer is a resistance marker for the anti-cancer drug 5-fluorouracil (5-FU) [79]. The presence of these bacteria may help explain why advanced prostate cancer has historically demonstrated poor response rates to 5-FU [80]. Fenollaria sp. nov., Peptoniphilus harei and Fusobacterium nucleatum have predicted citrate lyase complex: interestingly reduced citrate is a known predictor of cancer aggression in prostate cancer [81]. Other features for several the ABBS bacteria include the predicted presence of glycine cleavage complex and components of the pathway for biotin synthesis (FIG. 4), these are of interest as potential impact on human host cell metabolism pathways including fatty acid metabolism plus glycine and associated pathways which are known to be perturbed in prostate cancer [25,81,82,83].

TABLE 5
Correlation of bacteria 16S PCR positive samples with
background DNA staining. 16S PCR reactions were carried out
as detailed in the methods section for n = 111 urine samples.
Correlation of the detection of background DAPI staining by
microscopy to the presence of bacterial 16S PCR products
(X²-test, df = 1, P = 9.262e−10) confirmed that the stained
background DNA corresponded to the presence of bacteria.

| | | Positive by microscopy | | |
|---|---|---|---|---|
| | | Yes | No | Total |
| Positive by 16S | Yes | 63 | 13 | 76 |
| Ribosomal PCR | No | 8 | 27 | 35 |
| | Total | 71 | 40 | 111 |

TABLE 6
Novel bacterial species cultured from urine samples and prostate secretions.
Novel species isolated from clinical samples, including the phyla, class, order and genera that the proposed new species
belong to. Details of clinical sample used for culture and isolation of novel anaerobic species, reference strain
IDs and accession numbers.

| Novel Species Isolated | Novel species | Novel species | Novel species belonging | Novel species belonging |
|---|---|---|---|---|
| Bacteria ID | belonging to Phyla* | belonging to Class* | to Order | to Genus |
| Fenollaria sp. nov. [symbol] | Firmicutes | Clostridia | Clostridiales | Fenollaria |
| Peptoniphilus sp. nov. [symbol] | Firmicutes | Clostridia | Clostridiales | Peptoniphilus |
| Varibaculum sp. nov. [symbol] | Actinobacteria | Actinobacteria | Actinomycetales | Varibaculum |
| Porphyromonas sp. | Bacteroidetes | Bacteroidia | Bacteroidales | Porphyromonas |
| nov. [symbol] | | | | |

| | | | Reference | | |
|---|---|---|---|---|---|
| | | Details of clinical | Strain ID | | |
| Novel Species | | sample used for culture | culture | Reference Strain ID | |
| Isolated Bacteria | | and isolation of novel | collection | new proposed | Reference Strain ID |
| ID | Isolates sequenced | species | deposit | name | accession numbers |
| Fenollaria sp. nov. | isolates: 24, 27A, | isolated from urine | Fenollaria sp. | Fenollaria | ERS5804567 |
| [symbol] | 27B, 29, 35 | sample from a patient | nov.: | sporofastidiosus sp. | (SEQ ID NO: 26) |
| | | with high risk prostate | EMRHCC_24 | nov. | and |
| | | cancer | | | SAMEA8117584 |
| Peptoniphilus sp. | isolate 23 | isolated from urine | Peptoniphilus | Peptoniphilus | ERS5804566 |
| nov. [symbol] | | sample from a patient | sp. nov.: | rachelemmaiella | (SEQ ID |
| | | with high risk prostate | EMRHCC_23 | sp. nov. | NOs: 27-67) and |
| | | cancer | | | SAMEA8117583 |
| Varibaculum sp. | isolate 39 | isolated from urine | Varibaculum sp. | Varibaculum | ERS5804568 |
| nov. [symbol] | | sample from a patient | nov.: | prostatecancerukia | (SEQ ID NO: 25) |
| | | who underwent clinical | EMRHCC_39 | sp. nov. | and |
| | | assessment but had no | | | SAMEA8117585 |
| | | evidence of prostate | | | |
| | | cancer | | | |
| Porphyromonas | isolate 6C | isolated from | Porphyromonas | Porphyromonas | ERS5804565 |
| sp. nov. [symbol] | | prostatectomy | sp. nov. | bobii sp. nov. | (SEQ ID |
| | | specimen expressed | EMRHCC_6C | | NOs: 68-84) and |
| | | prostate secretion fluid | | | SAMEA8117582 |
| | | from a man with | | | |
| | | intermediate risk | | | |
| | | prostate cancer | | | |

TABLE 7
Detection of specific bacteria genera and species in clinical samples using qPCR assays
Bacterial species and genera detected in urine and prostate specimens using qPCR assays carried out
according to methods.

| | | Number of | Number of | Number of | |
|---|---|---|---|---|---|
| | Number of Urine | Prostate Secretion | Prostate Tissue | Periprostatic Fat | Number of Blood |
| | Samples Positive | Samples Positive | Samples Positive | Samples Positive | Samples Positive |
| Target Bacteria ID | (Total tested n = 49) | (Total tested n = 35) | (Total tested n = 70) | (Total tested n = 35) | (Total tested n = 20) |
| Fenollaria sp. nov. [symbol] | 32 | 1 | nd | nd | nd |
| Peptoniphilus sp. | 15 | 1 | 2 | 0 | 0 |
| nov. [symbol] | | | | | |
| Peptoniphilus harei | 39 | 4 | 9 | 2 | 0 |
| Varibaculum sp. | 10 | 2 | 6 | 0 | 0 |
| nov. [symbol] | | | | | |
| Porphyromonas sp. | 43 | 9 | 10 | 3 | 1 |
| Porphyromonas sp. | 3 | 6 | 0 | 0 | 0 |
| nov. [symbol] | | | | | |
| Porphyromonas | 9 | nd | nd | nd | nd |
| asaccharolytica | | | | | |
| Fusobacterium | 14 | 4 | 7 | 0 | 0 |
| nucleatum | | | | | |
| Propionimicrobium | 32 | 2 | 0 | 0 | 0 |
| lymphophilum | | | | | |
| Cutibacterium | 3 | 2 | 1 | 0 | 0 |
| acnes | | | | | |

nd: not determined

TABLE 8
Detection of specific bacteria genera and
species in clinical samples using qPCR assays

| | Genus or | | | |
|---|---|---|---|---|
| Target Bacteria | Species | | Primer F | Primer R |
| ID | Level Probe | Target | Sequence 5′-3′ | Sequence 5′-3′ |
| Fenollaria sp. | Species | RPL4 | GCGAACAAACGTCAAGGAAC | GCCTTTCCATTGAGGGCTTC |
| nov. [symbol] | | | (SEQ ID NO: 1) | (SEQ ID NO: 2) |
| Peptoniphilus sp. | Species | RPL4 | CACCGAAGACCAAGGCGTTA | GGTGCCGACCGTAGAAACTT |
| nov. [symbol] | | | (SEQ ID NO: 3) | (SEQ ID NO: 4) |
| Peptoniphilus | Species | RPL22 | GCGTTGATGAAGCCCTCTCTAT | ACCTTTAGCCTTAGGACGGAA |
| harei | | | (SEQ ID NO: 5) | (SEQ ID NO: 6) |
| Varibaculum sp. | Species | RPS3 | CGCTCGCAAACAGGTTGAAT | GGGCAGCATTTTCCGAAGC |
| nov. [symbol] | | | (SEQ ID NO: 7) | (SEQ ID NO: 8) |
| Porphyromonas sp. | Genus | 16S | AAGCGGAGGAACATGTGGTT | ACTTAAGCCGACACCTCACG |
| | | | (SEQ ID NO: 9) | (SEQ ID NO: 10) |
| Porphyromonas | Species | RPL22 | CCTACGTCGCCTCGTAAGAT | TGCGTCCGTTCTTCTCTTCC |
| sp. nov. [symbol] | | | (SEQ ID NO: 11) | (SEQ ID NO: 12) |
| Porphyromonas | Species | RPS3 | CGATCATACCTGGACGAGCC | TCGGCTACATACGTGGTTGG |
| asaccharolytica | | | (SEQ ID NO: 13) | (SEQ ID NO: 14) |
| Fusobacterium | Species | RPS3 | TCTGAATGGGCAGTTGAAGGA | AGCTTCCCCTCCTTCTTTCTT |
| nucleatum | | | (SEQ ID NO: 15) | (SEQ ID NO: 16) |
| Propionimicrobium | Species | RPL22 | ATGAGCCCGATGAAGGTTCG | CTACCGCAGAGGCAACTACC. |
| lymphophilum | | | (SEQ ID NO: 17) | (SEQ ID NO: 18) |
| Cutibacterium | Species | unique | GGATGACCTTGGTGGGGTAG | CACACAAATGGTGGTCACGG |
| acnes | | | (SEQ ID NO: 19) | (SEQ ID NO: 20) |

PCR primers used to detect each species and/or genera.

TABLE 9
16S Relative abundance of bacteria.
Bacteria at genus level are listed in order of relative abundance in Cluster 1 compared to the remaining
two clusters. Genera selected for further study based on relative abundance in Cluster 1 and statistical
significance included Fenollaria/Ezakiella, Peptoniphilus, Porphyromonas and Anaerococcus.

| | | | median relative | |
|---|---|---|---|---|
| | | median relative | abundance other | |
| Genus | P value | abundance Cluster 1 | Clusters | Adjusted P value |
| Ezakiella/Fenollaria | 0.000775889 | 20.22254341 | 0.144874846 | 0.030518295 |
| Prevotella | 0.115873648 | 7.020568159 | 27.31319324 | 0.564360451 |
| Peptoniphilus | 0.002319177 | 6.912546085 | 2.283346761 | 0.061069684 |
| Porphyromonas | 0.000624519 | 3.205810624 | 0.20272532 | 0.030518295 |
| Anaerococcus | 0.069616669 | 2.788885204 | 0.564219831 | 0.547651126 |
| Campylobacter | 0.010951604 | 1.663368086 | 0.191661906 | 0.176083542 |
| Negativicoccus | 2.99512E−05 | 0.982921136 | 0.004878525 | 0.003534239 |
| Varibaculum | 0.168219586 | 0.550157769 | 0.129890145 | 0.564360451 |
| Finegoldia | 0.571559692 | 0.496340506 | 0.552257236 | 0.741143337 |
| Mobiluncus | 0.018159881 | 0.300780346 | 0 | 0.238096213 |
| Propionimicrobium | 0.038439821 | 0.186991807 | 0.017344244 | 0.377991574 |
| Murdochiella | 0.011937867 | 0.031952799 | 0 | 0.176083542 |
| Aerococcus | 0.075283728 | 0 | 0.026495186 | 0.555217492 |
| Enterococcus | 0.002587698 | 0 | 0 | 0.061069684 |
| Escherichia-Shigella | 0.157143218 | 0 | 0 | 0.564360451 |
| Fusobacterium | 0.399399544 | 0 | 0.043136503 | 0.581841311 |
| Lawsonella | 0.068193095 | 0 | 0 | 0.547651126 |
| Psychrobacter | 0.094996393 | 0 | 0 | 0.564360451 |
| Treponema 2 | 0.032600998 | 0 | 0 | 0.349719796 |
| Veillonella | 0.063271445 | 0 | 0 | 0.547651126 |

TABLE 10
Anaerobic bacteria genera associated with poor prognosis prostate cancer included in the
Anaerobic Bacteria Biomarkers Set (ABBS).
Details of anaerobic bacteria genera included in ABBS,
including the phyla, class and order that the bacteria belong to. Details of the anaerobic bacteria species that
were isolated and identified in clinical samples belonging to genera included in ABBS.

| | | | | Novel Species | | |
|---|---|---|---|---|---|---|
| | | | | and known | Isolate IDs of | Other species |
| Anaerobic | | | | species isolated | novel species and | identified in |
| Bacteria | | | | by anaerobic | other species | clinical samples |
| Biomarker Set: | ABBS | ABBS | | culture | isolated | (165 sequence |
| ABBS bacteria | belonging to | belonging to | ABBS belonging | belonging to | belonging to | ID) belonging to |
| genera | Phylum | Class | to Order | ABBS genera | ABBS genera | ABBS genera |
| Fenollaria | Firmicutes | Clostridia | Clostridiales | Fenollaria sp. | Fenollaria sp. nov. | |
| | | | | nov. | (isolates: 24, 27A, | |
| | | | | | 27B, 29, 35) | |
| Peptoniphilus | Firmicutes | Clostridia | Clostridiales | Peptoniphilus | Peptoniphilus sp. | Peptoniphilus |
| | | | | sp. nov., | nov. (isolate: 23), | coxii |
| | | | | Peptoniphilus | Peptoniphilus | |
| | | | | harei | harei (isolates: 25, | |
| | | | | | 28, 33, 37, 38) | |
| Anaerococcus | Firmicutes | Clostridia | Clostridiales | Anaerococcus | Anaerococcus | Anaerococcus |
| | | | | prevotii | prevotii (isolates | lactolyticus |
| | | | | | 8B, 8S) | |
| Porphyromonas | Bacteroidetes | Bacteroidia | Bacteroidales | Porphyromonas | Porphyromonas | Porphyromonas |
| | | | | sp. nov., | sp. nov. (isolate: | bennonis |
| | | | | Porphyromonas | 6C), | |
| | | | | asaccharolytica | Porphyromonas | |
| | | | | | asaccharolytica | |
| | | | | | (isolates: 02_09, | |
| | | | | | 22_07) | |
| Fusobacterium | Fusobacteria | Fusobacteriia | Fusobacteriales | Fusobacterium | Fusobacterium | |
| | | | | nucleatum | nucleatum(isolate: | |
| | | | | | 02_15 (mixed) | |

TABLE 11
Clinical Data Associated with the urine microscopy cohort (n = 318).
Cohort is divided on the basis of microscopic bacterial detection in the urine.

| Characteristic | Bacteria Positive | | Bacteria Negative | | Total Dataset | |
|---|---|---|---|---|---|---|
| N | 168 | | 150 | | 318 | |
| Age, mean (median; IQR) | 69.44 | (69.5; 11) | 67.53 | (67; 11) | 68.55 | (68; 12) |
| PSA, mean (median; IQR) | 62.02 | (10.45; 15.65) | 11.81 | (7.1; 4.98) | 38.33 | (8.55; 8.95) |

Clinical Category, n

| | | | |
|---|---|---|---|
| Advanced | 16 | 2 | 18 |
| High Risk (D'amico) | 41 | 8 | 49 |
| Intermediate Risk (D'amico) | 56 | 26 | 82 |
| Low Risk (D'amico) | 6 | 11 | 17 |
| Other | 8 | 21 | 29 |
| Clinically Benign, no evidence | 11 | 28 | 39 |
| of cancer | | | |
| Raised PSA, Negative Biopsy | 30 | 54 | 84 |
| or unknown Gleason | | | |

Gleason Score, n

| 3 + 3 | 15 | | 13 | | 28 | |
|---|---|---|---|---|---|---|
| 3 + 4 | 38 | | 16 | | 54 | |
| 4 + 3 | 26 | | 8 | | 34 | |
| 4 + 4 | 9 | | 2 | | 11 | |
| 4 + 5 | 9 | | 4 | | 13 | |
| 5 + 4 | 8 | | 1 | | 9 | |
| 5 + 5 | 1 | | 0 | | 1 | |
| Cancer Specific Death, Yes (no; | 3 | (4, 161) | 0 | (1, 149) | 3 | (5; 310) |
| unknown) | | | | | | |
| Skeletal metastasis, Yes | 21 | (147) | 4 | (146) | 25 | (293) |
| (no/unknown) | | | | | | |

TABLE 12
Clinical data associated with the urine 16S sequencing cohort.
The groups indicate clusters found in FIG. 3. (3 samples known to have UTI and
originally included as UTI comparisons were removed from this analysis).

| Characteristic | Cluster 1 | | Cluster 2 | | Cluster 3 | |
|---|---|---|---|---|---|---|
| N | 22 | | 10 | | 14 | |
| Age, mean (median; IQR) | 70.45 | (73.00; 15.5) | 66.10 | (64.00; 10.75) | 68.00 | (65.50; 13.75) |
| PSA, mean (median; IQR) | 159.3 | (10.6; 19.6) | 100.27 | (6.10; 8.47) | 7.40 | (8.25; 4.5) |

Clinical Category, n

| | | | |
|---|---|---|---|
| Advanced | 4 | 1 | 0 |
| High Risk (D'amico) | 4 | 2 | 1 |
| Intermediate Risk (D'amico) | 1 | 4 | 5 |
| Low Risk (D'amico) | 0 | 1 | 0 |
| Other | 3 | 0 | 0 |
| Clinically Benign, no evidence | 5 | 1 | 4 |
| of cancer | | | |
| Raised PSA, Negative Biopsy | 5 | 1 | 4 |
| (or unknown gleason) | | | |

Gleason Score, n

| 3 + 3 | 0 | | 1 | | 0 | |
|---|---|---|---|---|---|---|
| 3 + 4 | 0 | | 3 | | 2 | |
| 4 + 3 | 3 | | 2 | | 3 | |
| 4 + 4 | 0 | | 0 | | 1 | |
| 4 + 5 | 0 | | 1 | | 0 | |
| 5 + 4 | 3 | | 0 | | 0 | |
| 5 + 5 | 0 | | 0 | | 0 | |
| Progression, n | 6 | | 4 | | 4 | |
| Skeletal Metastasis, n | 5 | | 1 | | 1 | |
| Leukocytes, positive (negative; | 8 | (10) | 2 | (5) | 5 | (7) |
| unknown) | | | | | | |
| Nitrates, positive (negative; | 1 | (17) | 0 | (7) | 0 | (13) |
| unknown) | | | | | | |

TABLE 13
Clinical data associated with the urine exosome RNA sequencing cohort.
Groups indicate the presence/absence of ABBS
(Ezakiella/Fenollaria, Peptoniphilus, Porphyromonas, Anaerococcus, Fusobacterium).
Progression/metastases events were determined by the following: appearance of prostate
cancer associated metastases on imaging, an increase in histological staging, prostate cancer associated
death or an increase in plasma PSA sufficient to affect the course of clinical treatment.

| | Samples positive for ABBS | | | | | |
|---|---|---|---|---|---|---|
| | genera associated with poor | | | | | |
| | prognosis: Anaerococcus, | | | | | |
| | Porphyromonas, | | Samples not positive for ABBS | | | |
| | Peptoniphilus, Fenollaria, | | genera associated with poor | | | |
| Characteristic | Fusobacterium | | prognosis | | Total Dataset | |
| N | 19 | | 21 | | 40 | |
| Age, mean (median; IQR) | 69.58 | (69.00; 12.5) | 67.05 | (66.00; 13.00) | 68.25 | (67.50; 14.25) |
| PSA, mean (median; IQR) | 11.24 | (7.70; 5.95) | 10.27 | (4.80, 9.00) | 10.73 | (6.90; 9.05) |

Clinical Category, n

| | | | |
|---|---|---|---|
| Advanced | 0 | 0 | 0 |
| High Risk (D'amico) | 6 | 6 | 12 |
| Intermediate Risk (D'amico) | 8 | 4 | 12 |
| Low Risk (D'amico) | 0 | 0 | 0 |
| Clinically Benign, no evidence | 5 | 11 | 16 |
| of cancer | | | |
| Raised PSA, Negative Biopsy | 0 | 0 | 0 |
| (or unknown gleason) | | | |

Gleason Score, n

| 3 + 3 | 0 | | 0 | | 0 | |
|---|---|---|---|---|---|---|
| 3 + 4 | 9 | | 4 | | 13 | |
| 4 + 3 | 3 | | 3 | | 6 | |
| 4 + 4 | 2 | | 0 | | 2 | |
| 4 + 5 | 2 | | 4 | | 6 | |
| 5 + 4 | 1 | | 0 | | 1 | |
| 5 + 5 | 0 | | 0 | | 0 | |
| Progression/metastasis, n | 11 | | 2 | | 13 | |
| Leukocytes, positive (negative; | 8 | (6) | 4 | (10) | 12 | (16; 12) |
| unknown) | | | | | | |
| Nitrates, positive (negative; | 0 | (14) | 0 | (14) | 0 | (28; 12) |
| unknown) | | | | | | |

TABLE 14
Clinical data associated with the ICGC whole genome sequence primary tumour samples
used for the targeted alignment approach.
Groups are split on the presence/absence of ABBS
(Ezakiella/Fenollaria, Peptoniphilus, Porphyromonas, Anaerococcus, Fusobacterium).
Only participants with clinical data are displayed.

| | Samples positive for ABBS | | | | | |
|---|---|---|---|---|---|---|
| | genera associated with poor | | | | | |
| | prognosis: Anaerococcus, | | | | | |
| | Porphyromonas, | | Samples not positive for ABBS | | | |
| | Peptoniphilus, Fenollaria, | | genera associated with poor | | | |
| Characteristic | Fusobacterium | | prognosis | | Total Dataset | |
| N | 26 | | 178 | | 204 | |
| Age, mean (median; IQR) | 63.54 | (62.00, 8.75) | 61.72 | (63.00, 10) | 61.96 | (62.50, 10) |
| PSA, mean (median; IQR) | 89.27 | (93.50, 55.5) | 81.45 | (87.50, 76.5) | 82.45 | (88.00, 76.25) |

Clinical Category, n

| | | | |
|---|---|---|---|
| Advanced | 1 | 1 | 2 |
| High Risk (D'amico) | 5 | 26 | 31 |
| Intermediate Risk (D'amico) | 16 | 120 | 136 |
| Low Risk (D'amico) | 3 | 31 | 34 |
| Clinically Benign, no evidence | 0 | 0 | 0 |
| of cancer | | | |
| Raised PSA, Negative Biopsy | 0 | 0 | 1 |
| (or Unknown Gleason) | | | |

Gleason Score, n

| 3 + 3 | 3 | | 49 | | 52 | |
|---|---|---|---|---|---|---|
| 3 + 4 | 14 | | 85 | | 99 | |
| 3 + 5 | 0 | | 3 | | 3 | |
| 4 + 3 | 5 | | 23 | | 28 | |
| 4 + 4 | 1 | | 5 | | 6 | |
| 4 + 5 | 1 | | 10 | | 11 | |
| 5 + 4 | 0 | | 3 | | 3 | |
| 5 + 5 | 0 | | 0 | | 0 | |
| Family History (first degree), | 5 | (1) | 48 | (16) | 53 | (17) |
| yes (no) | | | | | | |
| Cancer Specific Death, Yes (no) | 3 | (3) | 2 | (2) | 5 | (5) |

| | | | |
|---|---|---|---|
| Biochemical recurrence | 11 | 28 | 39 |
| metastasis | 1 | 4 | 6 |

TABLE 15
Bacterial genomes used to develop BWA alignment database for WGS data targeted approach.
The reference genomes were downloaded from NCBI refseq.
Assembly Name

| RefSeq Assembly | In House Isolate Assembly |
|---|---|
| Prevotella_bivia_DSM_20514 | Isolate_28_Peptoniphilus_duerdenii |
| Stenotrophomonas_maltophilia_K279a | Isolate_23_Peptoniphilus_sp. nov. |
| Fenollaria_massiliensis | Isolate_27B_Fenollaria sp. nov. |
| Propionimicrobium_lymphophilum_ACS.093.V.SCH5 | Isolate_39_Varibaculum sp. nov. |
| Staphylococcus_epidermidis_PM221 | Isolate_44b_Actinomyces_urogenitalis |
| Lysobacter_enzymogenes_strain_C3 | Isolate_3B_Streptococcus |
| Ralstonia_pickettii_12D | Isolate_4A_Staphylococcus_epidermidis |
| Escherichia_coli_str._K.12 | Isolate_5_Facklamia |
| Porphyromonas_somerae_DSM_23386 | Isolate_6B_Streptococcus |
| Anaerococcus_lactolyticus_ATCC_51172 | Isolate_3A_Streptococcus |
| Staphylococcus_aureus_subsp._ aureus_ST398 | Isolate_38_Peptoniphilus_harei |
| Prevotella_corporis_DSM_18810 | Isolate_6C_Porphyromonas sp. nov. |
| Propionimicrobium_sp._ BV2F7 | Isolate_6A_Streptococcus |
| Peptoniphilus_coxii_strain_DNF00729 | Isolate_4_Propionimicrobium_lymphophilum |
| Propionibacterium_acnes_ATCC_11828 | Isolate_5E_Cutibacterium_acnes |
| Actinotignum_urinale_DSM_15805 | Isolate_44a_Enterococcus_faecalis |
| Streptococcus_agalactiae_NEM316 | |
| Peptoniphilus_harei_ACS.146.V.Sch2b | |
| Fusobacterium_nucleatum_subsp._animalis_7_1 | |
| Enterococcus_faecalis_13.SD.W.01 | |
| Prevotella_timonensis_4401737 | |
| Sneathia_sanguinegens_strain_CCUG41628 | |
| Facklamia_hominis_ACS.120.V.Sch10 | |
| Acinetobacter_lwoffii_ATCC_9957 | |
| Mycoplasma_genitalium_G37 | |
| Aerococcus_urinae_ACS.120.V.Col10a | |
| Anaerococcus_hydrogenalis_DSM_7454 | |
| Actinobaculum_massiliense_ACS.171.V.Col2 | |
| Escherichia_coli_UMN026 | |
| Actinomyces_turicensis_ACS.279.V.Col4 | |
| Mycoplasma_hyorhinis_SK76 | |
| Mobiluncus_curtisii_ATCC_43063. | |
| Peptoniphilus_sp._BV3C26 | |
| Streptococcus_mitis_B6 | |
| Varibaculum_cambriense_DSM_15806 | |
| Actinomyces_neuii_BVS029A5 | |
| Fusobacterium_nucleatum_subsp._vincentii_3_1_36A2 | |
| Parvimonas_micra_A293 | |
| Streptococcus_anginosus_C238 | |
| Corynebacterium_pyruviciproducens_ATCC_BAA.1742 | |
| Prevotella_disiens_JCM_6334 | |
| Clostridiales_bacterium_9403326 | |
| Corynebacterium_pseudogenitalium_ATCC_33035 | |
| Anaerococcus_lactolyticus_S7.1.13 | |
| Actinobaculum_schaalii_strain_CCUG_27420. | |
| Pseudomonas_chlororaphis_HT66 | |
| Leishmania_major | |
| Toxoplasma_gondii_ME49 | |
| Anaerococcus_prevotii_ACS.065.V.Col13 | |
| Propionimicrobium_lymphophilum_DSM_4903 | |
| Porphyromonas_bennonis_DSM_23058 | |
| Anaerococcus_prevotii_DSM_20548 | |
| Enterococcus_faecalis_TX0630 | |
| Prevotella_buccalis_ATCC_35310 | |
| Finegoldia_magna_ATCC_53516 | |
| Fusobacterium_gonidiaformans_3.1.5R | |
| Corynebacterium_glucuronolyticum_ATCC_51867 | |
| Campylobacter_ureolyticus_RIGS_9880 | |

### Example 6—Quantitative Analysis of Bacteria Using qPCR-Based Approaches

[0187] We have confirmed the presence and assessed the prevalence of ABBS bacteria in urine in >300 clinical samples, bacteria including: Porphyromonas spp., Peptoniphilus spp. Fenollaria sporofastidiosus sp.nov., Fusobacterium nucleatum and Anaerococcus species (for complete list see Table 16 below). qPCR assays were designed and validated to detect species, including all four of the novel species, plus Peptoniphilus coxii, Peptoniphilus duerdenii, Porphyromonas bennonis, Anaerococcus prevotii Anaerococcus lactolyticus and co-occurring bacteria including Prevotella timonensis. The details of the PCR assays and primer pairs used to detect the bacteria are included in Table 17. The presence or absence of ABBS and co-occurring bacteria were assessed in more than 300 urine samples using the genera- or species-specific qPCR assays (Table 16).

TABLE 16
Detection of specific bacteria genera and species in urine samples with
genera- and species-specific qPCR assays. (♦ = novel species)

| | Number of | |
|---|---|---|
| | urine | % |
| | samples | urine samples |
| | positive | positive for |
| Target bacteria ID | (Total n = 304) | bacterial species |
| Fenollaria sp. nov. ♦ | 64 | 21.1% |
| Peptoniphilus sp. nov. ♦ | 25 | 8.2% |
| Peptoniphilus coxii | 61 | 20% |
| Peptoniphilus duerdenii | 53 | 17.4% |
| Peptoniphilus harei | 169 | 55.5% |
| Porphyromonas sp. (genus level) | 243 | 79.9% |
| Porphyromonas sp. nov. ♦ | 3 | 1% |
| Porphyromonas asaccharolytica | 20 | 6.58% |
| Porphyromonas bennonis | 49 | 16.1% |
| Anaerococcus prevotii | 102 | 33.5% |
| Anaerococcus lactolyticus | 130 | 42.7% |
| Fusobacterium nucleatum | 36 | 11.8% |
| Varibaculum sp. nov. ♦ | 40 | 113.2% |
| Prevotella sp. (genus level) | 210 | 69.1% |
| Prevotella timonensis | 104 | 34.2% |
| Propionimicrobium lymphophilum | 120 | 39.5% |
| Campylobacter ureolyticus | 79 | 26% |
| Human DNA | 304 | |

TABLE 17
Detection of specific bacteria genera and
species in urine using qPCR assays.

| Target | Genus or | | | |
|---|---|---|---|---|
| Bacteria | Species | | Primer F | Primer R |
| ID | Level Assay | Target | Sequence 5′-3′ | Sequence 5′-3′ |
| Peptoniphilus | Species | RPL22 | AGTTCTTCACTCCGCTGTCG | CGCCATACCCTTTGCTTTGG |
| coxii | | | (SEQ ID NO: 85) | (SEQ ID NO: 86) |
| Peptoniphilus | Species | RPL22 | TCGTGGCAAAAGCGTTGAAG | GTTGGTCCGTCATTTGCGTA |
| duerdenii | | | (SEQ ID NO: 87) | (SEQ ID NO: 88) |
| Porphyromonas | Species | RPL32 | ACTCACGACGTAGCCAAGAC | TCCACCTCTACAGCGATCTGA |
| bennonis | | | (SEQ ID NO: 89) | (SEQ ID NO: 90) |
| Anaerococcus | Species | RPL4 | GCAAATACAACTCCACCGCC | TGCGAAAACTCGTTCAGAGGT |
| prevotii | | | (SEQ ID NO: 91) | (SEQ ID NO: 92) |
| Anaerococcus | Species | RPL22 | CGCTGAAAACAACAACGGACT | CCGCTAACTCTACGCCGATA |
| lactolyticus | | | (SEQ ID NO: 93) | (SEQ ID NO: 94) |
| Prevotella sp. | Genus | 16S | GCACGGTAAACGATGGATGC | TTCAAGCCCGGGTAAGGTTC |
| | | | (SEQ ID NO: 95) | (SEQ ID NO: 96) |
| Prevotella | Species | RPL22 | GAGCAAGAAAGCATATAGCGGC | TCGCAATACTCCAAGGGCAC |
| timonensis | | | (SEQ ID NO: 97) | (SEQ ID NO: 98) |

Details of qPCR assays carried out according to methods.

[0188] Several bacteria genera and species were present in >50% of urine samples analysed from patients attending the urology PSA clinic, including Porphyromonas sp., Prevotella sp. and Peptoniphilus harei. The four novel species were detected in urine samples, with Porphyromonas sp. nov only in <z1% of samples, Peptoniphilus sp. nov. in 8% of the samples analysed, Varibaculum sp. nov. in 13% and F. Sporofastidiosus sp. nov in 21% of urine samples. The results for several of the qPCR assays for screening the presence and absence of bacteria in the urine samples across the clinical categories are shown below in FIG. 16. Investigation into the presence of bacteria detected by qPCR and clinical category at baseline indicates that there is a trend towards an increased percentage of samples positive for certain bacterial species/genera in high risk or advanced clinical samples (for example see Fenollaria sporofastidiosus sp. nov., Peptoniphilus harei, Prevotella timonensis, Porphyromonas sp., Anaerococcus lactolyticus and Anaerococcus prevotii in FIG. 16). Prevotella timonesis may be a particularly useful bactertial species in detecting and distinguishing high risk prostate cancer groups in clinical samples.

[0189] Genomic sequence details of Prevotella timonensis are available in established sequence databases and are disclosed herein as SEQ ID NOs: 99-120. The methods described herein may use a nucleotide primer that is substantially complementary or reverse complementary to a corresponding length portion of any one of SEQ ID NOs: 99-120.

TABLE 18
Sequence deposit details of Prevotella timonensis

| GenBank Accession | RefSeq Accession | Title |
|---|---|---|
| GCA_002894165.1 | GCF_002894165.1 | Prevotella |
| (SEQ ID NOs: 99-120) | | timonensis |

### Example 7—ABBS Genera Detection in Prostate Tumor Whole Genome Sequencing Samples

[0190] SEPATH [63] was ran on N=2,176 prostate tumourwhole genome sequencing samples from the pan-prostate cancer group (http://panprostate.org). Participants were filtered to those containing followup data (N=818). Participants with evidence for at least one ABBS genera (N=146, see FIG. 17; blue, as determined by a minimum of 10 taxonomically classified sequencing reads by Kraken for at least one of the genera: Fenollaria, Ezakiella, Peptoniphilus, Porphyromonas, Anaerococcus, Fusobacterium) were compared to those that had no evidence of ABBS genera (N=672, see FIG. 17; red). There was a statistically significant difference between the groups in terms of relapse-free survival (P=0.023, log-rank test), with the ABBS group demonstrating a poorer prognosis.

### Survival Analysis

[0191] Survival analysis was carried out in R (version 4.2.1). Models were fit using the survfit function (survival package, version 3.5.0) and plotted using ggsurvplot (survminer package, version 0.4.9).

[0192] Additional examples of the presently described method and system embodiments are suggested according to the structures and techniques described herein. Other non-limiting examples may be configured to operate separately, or can be combined in any permutation or combination with any one or more of the other examples provided above or throughout the present disclosure.

[0193] All publications, patents and patent applications referred to herein are incorporated by reference in their entirety to the same extent as if each individual publication, patent or patent application was specifically and individually indicated to be incorporated by reference in its entirety.

### Embodiments

[0194] Further embodiments of the present invention are described below:

[0195] 1. A method of detecting the presence of one or more bacteria selected from the genera Fenollaria, Ezakiella, Peptoniphilus, Porphyromonas, Anaerococcus, Varibaculum and Fusobacterium in a biological sample from the patient.

[0196] 2. A method of detecting the presence of one or more bacteria selected from the genera Fenollaria, Peptoniphilus, Porphyromonas, Anaerococcus and Fusobacterium in a biological sample from the patient.

[0197] 3. The method according to embodiment 1 or embodiment 2, wherein the one or more bacteria are selected from: Fenollaria sporofastidiosus, Peptoniphilus rachelemmaiella, Peptoniphilus harei, Peptoniphilus coxii, Anaerococcus prevotii, Anaerococcus lactolyticus, Porphyromonas bobii, Porphyromonas asaccharolytica, Porphyromonas bennonis and Fusobacterium nucleatum.

[0198] 4. The method according to any one of embodiments 1 to 3, wherein the one or more bacteria are selected from: Fenollaria sporofastidiosus, Peptoniphilus rachelemmaiella, Peptoniphilus harei, Anaerococcus prevotii, Porphyromonas bobii, Porphyromonas asaccharolytica and Fusobacterium nucleatum.

[0199] 5. The method according to any one of embodiments 1 to 3, wherein the one or more bacteria are selected from: Fenollaria sporofastidiosus, Peptoniphilus rachelemmaiella, Anaerococcus prevotii, Porphyromonas bobii, Porphyromonas asaccharolytica and Fusobacterium nucleatum.

[0200] 6. The method according to any one of embodiments 1 to 3, wherein the one or more bacteria are selected from: Fenollaria sporofastidiosus, Peptoniphilus harei, Anaerococcus prevotii, Porphyromonas bobii, Porphyromonas asaccharolytica and Fusobacterium nucleatum.

[0201] 7. The method according to any one of embodiments 1 to 3, wherein the one or more bacteria are selected from: Fenollaria sporofastidiosus, Peptoniphilus rachelemmaiella, Peptoniphilus harei, Anaerococcus prevotii, Porphyromonas asaccharolytica and Fusobacterium nucleatum.

[0202] 8. The method according to any one of embodiments 1 to 3, wherein the one or more bacteria are selected from: Fenollaria sporofastidiosus, Peptoniphilus rachelemmaiella, Peptoniphilus harei, Anaerococcus prevotii, Porphyromonas bobii and Fusobacterium nucleatum.

[0203] 9. The method according to any one of embodiments 1 to 3, wherein the one or more bacteria are selected from: Fenollaria sporofastidiosus, Peptoniphilus rachelemmaiella, Anaerococcus prevotii, Porphyromonas bobii and Fusobacterium nucleatum.

[0204] 10. The method according to any one of embodiments 1 to 3, wherein the one or more bacteria are selected from: Fenollaria sporofastidiosus, Peptoniphilus rachelemmaiella, Anaerococcus prevotii, Porphyromonas asaccharolytica and Fusobacterium nucleatum.

[0205] 11. The method according to any one of embodiments 1 to 3, wherein the one or more bacteria are selected from: Fenollaria sporofastidiosus, Peptoniphilus harei, Anaerococcus prevotii, Porphyromonas bobii and Fusobacterium nucleatum.

[0206] 12. The method according to any one of embodiments 1 to 3, wherein the one or more bacteria are selected from: Fenollaria sporofastidiosus, Peptoniphilus harei, Anaerococcus prevotii, Porphyromonas asaccharolytica and Fusobacterium nucleatum.

[0207] 13. The method according to any one of embodiments 1 to 12, wherein the method comprises detecting the presence of at least 1, 2, 3, 4, 5, 6, 7, 8, 9 or 10 different bacteria.

[0208] 14. The method according to any one of embodiments 1 to 13, wherein the method comprises detecting all of the species and/or genera recited in a given list.

[0209] 15. The method according to embodiment 1 or embodiment 2, wherein the method comprises detecting each of Fenollaria sporofastidiosus, Peptoniphilus rachelemmaiella, Peptoniphilus harei, Peptoniphilus coxii, Anaerococcus prevotii, Anaerococcus lactolyticus, Porphyromonas bobii, Porphyromonas asaccharolytica, Porphyromonas bennonis and Fusobacterium nucleatum.

[0210] 16. The method according to any one of embodiments 1 to 15, wherein the method comprises detecting each of Fenollaria sporofastidiosus, Peptoniphilus rachelemmaiella, Peptoniphilus harei, Anaerococcus prevotii, Porphyromonas bobii, Porphyromonas asaccharolytica and Fusobacterium nucleatum.

[0211] 17. The method according to any one of embodiments 4 to 14 or 16, further comprising detecting the presence of one or more bacteria selected from Peptoniphilus coxii, Anaerococcus lactolyticus and Porphyromonas bennonis.

[0212] 18. The method according to any one of embodiments 1 to 17, further comprising detecting the presence of Varibaculum prostatecancerukia.

[0213] 19. The method according to any one of embodiments 1 to 18, wherein one or more of the bacteria are selected from: Fenollaria sporofastidiosus (identified by ECACC accession number 21092201 or DSMZ accession number DSM 34056), Peptoniphilus rachelemmaiella (identified by ECACC accession number 21092202 or DSMZ accession number DSM 34055) and Porphyromonas bobii (identified by ECACC accession number 21092204 or DSMZ accession number DSM 34063).

[0214] 20. The method according to any one of embodiments 1 to 19, wherein the bacteria is Varibaculum prostatecancerukia (identified by ECACC accession number 21092203 or DSMZ accession number DSM 34057).

[0215] 21. The method according to any preceding embodiment, wherein the biological sample is processed prior to determining the presence of the one or more bacteria in the biological sample.

[0216] 22. The method according to any preceding embodiment, wherein determining the presence of the one or more bacteria comprises extracting a nucleic acid from the biological sample.

[0217] 23. The method according to any preceding embodiment, wherein determining the presence of the one or more bacteria comprises extracting bacterial DNA from the biological sample.

[0218] 24. The method according to any preceding embodiment, wherein determining the presence of the one or more bacteria comprises extracting bacterial RNA from the biological sample.

[0219] 25. The method according to any preceding embodiment, wherein determining the presence of the one or more bacteria comprises extracting one or more bacterial proteins from the biological sample.

[0220] 26. The method according to any preceding embodiment, wherein determining the presence of the one or more bacteria comprises extracting one or more bacteria-specific carbohydrates from the biological sample.

[0221] 27. The method according to any preceding embodiment, wherein the biological sample is a urine sample, a semen sample, a prostatic exudate sample, or any sample containing macromolecules or cells originating in the prostate, a whole blood sample, a serum sample, saliva, or a biopsy (such as a prostate tissue sample or a tumour sample).

[0222] 28. The method according to any preceding embodiment wherein the biological sample is a urine sample.

[0223] 29. The method according to any preceding embodiment, wherein the presence of the one or more bacteria is determined using quantitative polymerase chain reaction (qPCR) or a probe-based detection assay (such as NanoString®).

[0224] 30. The method according to any preceding embodiment, wherein the presence of the one or more bacteria is determined using quantitative polymerase chain reaction (qPCR) or a probe-based detection assay (such as NanoString®) wherein the qPCR or probe-based detection assay is conducted on one or more of bacterial nucleic acids in the biological sample.

[0225] 31. The method according to any preceding embodiment, wherein determining the presence of the one or more bacteria comprises detecting one or more bacterial proteins in a sample.

[0226] 32. The method according to any preceding embodiment, wherein determining the presence of the one or more bacteria comprises detecting one or more bacterial-specific carbohydrates.

[0227] 33. The method according to any preceding embodiment, wherein the presence of the one or more bacteria is determined using matrix-assisted laser desorption/ionization-time of flight mass spectrometry (MALDI-TOF).

[0228] 34. The method according to any one of embodiments 1 to 30, wherein the presence of the one or more bacteria is determined using quantitative polymerase chain reaction (qPCR) or a probe-based detection assay (such as NanoString®) using one or more primers comprising a nucleotide sequence selected from the list SEQ ID NO:1, SEQ ID NO:2, SEQ ID NO:3, SEQ ID NO:4, SEQ ID NO:5, SEQ ID NO:6, SEQ ID NO:7, SEQ ID NO:8, SEQ ID NO:9, SEQ ID NO:10, SEQ ID NO:11, SEQ ID NO:12, SEQ ID NO:13, SEQ ID NO:14, SEQ ID NO:15, SEQ ID NO:16, SEQ ID NO:17, SEQ ID NO:18, SEQ ID NO:19 and SEQ ID NO:20.

[0229] 35. The method according to any one of embodiments 1 to 30, wherein the presence of the one or more bacteria is determined using quantitative polymerase chain reaction (qPCR) or a probe-based detection assay (such as NanoString®) using one or more primers consisting of a nucleotide sequence selected from the list SEQ ID NO:1, SEQ ID NO:2, SEQ ID NO:3, SEQ ID NO:4, SEQ ID NO:5, SEQ ID NO:6, SEQ ID NO:7, SEQ ID NO:8, SEQ ID NO:9, SEQ ID NO:10, SEQ ID NO:11, SEQ ID NO:12, SEQ ID NO:13, SEQ ID NO:14, SEQ ID NO:15, SEQ ID NO:16, SEQ ID NO:17, SEQ ID NO:18, SEQ ID NO:19 and SEQ ID NO:20.

[0230] 36. A method of providing a cancer prognosis in a patient based on the presence of one or more bacteria in a biological sample from the patient, comprising:
[0231] (a) detecting the presence of one or more bacteria selected from the genera Fenollaria, Ezakiella, Peptoniphilus, Porphyromonas, Anaerococcus, Varibaculum and Fusobacterium in a biological sample from the patient, and
[0232] (b) providing a prognosis for the patient, wherein the patient has a poor prognosis if one or more of the bacteria are present in the biological sample.

[0233] 37. A method of providing a cancer prognosis in a patient based on the presence of one or more bacteria in a biological sample from the patient, comprising:
[0234] (a) detecting the presence of one or more bacteria selected from the genera Fenollaria, Peptoniphilus, Porphyromonas, Anaerococcus and Fusobacterium in a biological sample from the patient, and
[0235] (b) providing a prognosis for the patient, wherein the patient has a poor prognosis if one or more of the bacteria are present in the biological sample.

[0236] 38. The method according to embodiment 36 or embodiment 37, wherein the one or more bacteria are selected from: Fenollaria sporofastidiosus, Peptoniphilus rachelemmaiella, Peptoniphilus harei, Peptoniphilus coxii, Anaerococcus prevotii, Anaerococcus lactolyticus, Porphyromonas bobii, Porphyromonas asaccharolytica, Porphyromonas bennonis and Fusobacterium nucleatum.

[0237] 39. The method according to any one of embodiments 36 to 38, wherein the one or more bacteria are selected from: Fenollaria sporofastidiosus, Peptoniphilus rachelemmaiella, Peptoniphilus harei, Anaerococcus prevotii, Porphyromonas bobii, Porphyromonas asaccharolytica and Fusobacterium nucleatum.

[0238] 40. The method according to any one of embodiments 36 to 38, wherein the one or more bacteria are selected from: Fenollaria sporofastidiosus, Peptoniphilus rachelemmaiella, Anaerococcus prevotii, Porphyromonas bobii, Porphyromonas asaccharolytica and Fusobacterium nucleatum.

[0239] 41. The method according to any one of embodiments 36 to 38, wherein the one or more bacteria are selected from: Fenollaria sporofastidiosus, Peptoniphilus harei, Anaerococcus prevotii, Porphyromonas bobii, Porphyromonas asaccharolytica and Fusobacterium nucleatum.

[0240] 42. The method according to any one of embodiments 36 to 38, wherein the one or more bacteria are selected from: Fenollaria sporofastidiosus, Peptoniphilus rachelemmaiella, Peptoniphilus harei, Anaerococcus prevotii, Porphyromonas asaccharolytica and Fusobacterium nucleatum.

[0241] 43. The method according to any one of embodiments 36 to 38, wherein the one or more bacteria are selected from: Fenollaria sporofastidiosus, Peptoniphilus rachelemmaiella, Peptoniphilus harei, Anaerococcus prevotii, Porphyromonas bobii and Fusobacterium nucleatum.

[0242] 44. The method according to any one of embodiments 36 to 38, wherein the one or more bacteria are selected from: Fenollaria sporofastidiosus, Peptoniphilus rachelemmaiella, Anaerococcus prevotii, Porphyromonas bobii and Fusobacterium nucleatum.

[0243] 45. The method according to any one of embodiments 36 to 38, wherein the one or more bacteria are selected from: Fenollaria sporofastidiosus, Peptoniphilus rachelemmaiella, Anaerococcus prevotii, Porphyromonas asaccharolytica and Fusobacterium nucleatum.

[0244] 46. The method according to any one of embodiments 36 to 38, wherein the one or more bacteria are selected from: Fenollaria sporofastidiosus, Peptoniphilus harei, Anaerococcus prevotii, Porphyromonas bobii and Fusobacterium nucleatum.

[0245] 57. The method according to any one of embodiments 36 to 38, wherein the one or more bacteria are selected from: Fenollaria sporofastidiosus, Peptoniphilus harei, Anaerococcus prevotii, Porphyromonas asaccharolytica and Fusobacterium nucleatum.

[0246] 48. The method according to any one of embodiments 36 to 47, wherein the method comprises detecting the presence of at least 1, 2, 3, 4, 5, 6, 7, 8, 9 or 10 different bacteria.

[0247] 49. The method according to any one of embodiments 36 to 48, wherein the method comprises detecting all of the species recited in a given list.

[0248] 50. The method according to any one of embodiments 36 to 38, wherein the method comprises detecting each of Fenollaria sporofastidiosus, Peptoniphilus rachelemmaiella, Peptoniphilus harei, Peptoniphilus coxii, Anaerococcus prevotii, Anaerococcus lactolyticus, Porphyromonas bobii, Porphyromonas asaccharolytica, Porphyromonas bennonis and Fusobacterium nucleatum.

[0249] 51. The method according to any one of embodiments 36, 37 or 39, wherein the method comprises detecting each of Fenollaria sporofastidiosus, Peptoniphilus rachelemmaiella, Peptoniphilus harei, Anaerococcus prevotii, Porphyromonas bobii, Porphyromonas asaccharolytica and Fusobacterium nucleatum.

[0250] 52. The method according to any one of embodiments 36 to 49 or 51, further comprising detecting the presence of one or more bacteria selected from Peptoniphilus coxii, Anaerococcus lactolyticus and Porphyromonas bennonis.

[0251] 53. The method according to any one of embodiments 36 to 52, further comprising detecting the presence of Varibaculum prostatecancerukia.

[0252] 54. The method according to any one of embodiments 36 to 53, wherein one or more of the bacteria are selected from: Fenollaria sporofastidiosus (identified by ECACC accession number 21092201 or DSMZ accession number DSM 34056), Peptoniphilus rachelemmaiella (identified by ECACC accession number 21092202 or DSMZ accession number DSM 34055) and Porphyromonas bobii (identified by ECACC accession number 21092204 or DSMZ accession number DSM 34063).

[0253] 55. The method according to any one of embodiments 36 to 54, wherein the bacteria is Varibaculum prostatecancerukia (identified by ECACC accession number 21092203 or DSMZ accession number DSM 34057).

[0254] 56. The method according to any one of embodiments 36 to 55, wherein a poor prognosis is associated with an increased risk of elevated rates of metastases.

[0255] 57. The method according to any one of embodiments 36 to 55, wherein a poor prognosis is associated with a progression of the cancer stage.

[0256] 58. The method according to any one of embodiments 36 to 55, wherein a poor prognosis is associated with an increase in prostate-specific antigen (PSA) and/or PSA failure.

[0257] 59. The method according to any one of embodiments 36 to 55, wherein a poor prognosis is associated with an increased cancer risk score, optionally wherein the risk score is a Gleason risk score.

[0258] 60. The method according to any one of embodiments 36 to 59, wherein the biological sample is a urine sample, a semen sample, a prostatic exudate sample, or any sample containing macromolecules or cells originating in the prostate, a whole blood sample, a serum sample, saliva, or a biopsy (such as a prostate tissue sample or a tumour sample).

[0259] 61. The method according to any one of embodiments 36 to 60, wherein the biological sample is a urine sample.

[0260] 62. The method according to any one of embodiments 36 to 61, wherein the method is used to determine whether a patient should be biopsied.

[0261] 63. The method according to any one of embodiments 36 to 62, wherein the biological sample is processed prior to determining the presence of the one or more bacteria in the biological sample.

[0262] 64. The method according to any one of embodiments 36 to 63, wherein determining the presence of the one or more bacteria comprises extracting a nucleic acid from the biological sample.

[0263] 65. The method according to any one of embodiments 36 to 64, wherein determining the presence of the one or more bacteria comprises extracting bacterial DNA from the biological sample.

[0264] 66. The method according to any one of embodiments 36 to 64, wherein determining the presence of the one or more bacteria comprises extracting bacterial RNA from the biological sample.

[0265] 67. The method according to any one of embodiments 36 to 64, wherein determining the presence of the one or more bacteria comprises detecting one or more bacterial proteins in a sample.

[0266] 68. The method according to any one of embodiments 36 to 64, wherein determining the presence of the one or more bacteria comprises detecting one or more bacterial-specific carbohydrates.

[0267] 69. The method according to any one of embodiments 36 to 66, wherein the presence of the one or more bacteria is determined using quantitative polymerase chain reaction (qPCR) or a probe-based detection assay (such as NanoString®).

[0268] 70. The method according to any one of embodiments 36 to 66 or 69, wherein the presence of the one or more bacteria is determined using quantitative polymerase chain reaction (qPCR) or a probe-based detection assay (such as NanoString®) using one or more primers comprising a nucleotide sequence selected from the list SEQ ID NO:1, SEQ ID NO:2, SEQ ID NO:3, SEQ ID NO:4, SEQ ID NO:5, SEQ ID NO:6, SEQ ID NO:7, SEQ ID NO:8, SEQ ID NO:9, SEQ ID NO:10, SEQ ID NO:11, SEQ ID NO:12, SEQ ID NO:13, SEQ ID NO:14, SEQ ID NO:15, SEQ ID NO:16, SEQ ID NO:17, SEQ ID NO:18, SEQ ID NO:19 and SEQ ID NO:20.

[0269] 71. The method according to any one of embodiments 36 to 66 or 69, wherein the presence of the one or more bacteria is determined using quantitative polymerase chain reaction (qPCR) or a probe-based detection assay (such as NanoString®) using one or more primers consisting of a nucleotide sequence selected from the list SEQ ID NO:1, SEQ ID NO:2, SEQ ID NO:3, SEQ ID NO:4, SEQ ID NO:5, SEQ ID NO:6, SEQ ID NO:7, SEQ ID NO:8, SEQ ID NO:9, SEQ ID NO:10, SEQ ID NO:11, SEQ ID NO:12, SEQ ID NO:13, SEQ ID NO:14, SEQ ID NO:15, SEQ ID NO:16, SEQ ID NO:17, SEQ ID NO:18, SEQ ID NO:19 and SEQ ID NO:20.

[0270] 72. The method according to any preceding embodiment wherein the sample is from a human.

[0271] 73. A method of treating a cancer in a patient in need thereof, comprising providing a prognosis of a patient's cancer using a method as defined in any one of embodiments 36 to 72, and administering to the patient a therapy for treating cancer.

[0272] 74. A method of treating cancer in a patient in need thereof, wherein the prognosis of the patient has been determined according to a method as defined in any one of embodiments 36 to 72, comprising administering to the patient a therapy for treating cancer.

[0273] 75. The method according to any one of embodiments 32 to 67, wherein the cancer is selected from the list: Acute Lymphoblastic Leukemia (ALL), Acute Myeloid Leukemia (AML), Adrenocortical Carcinoma, Kaposi Sarcoma (Soft Tissue Sarcoma), AIDS-Related Lymphoma (Lymphoma), Primary CNS Lymphoma (Lymphoma), Anal Cancer, Appendix Cancer, Astrocytomas, Atypical Teratoid/Rhabdoid Tumor, Central Nervous System (Brain Cancer), Basal Cell Carcinoma, Bile Duct Cancer, Bladder Cancer, Bone Cancer (includes Ewing Sarcoma and Osteosarcoma and Malignant Fibrous Histiocytoma), Brain Tumors, Breast Cancer, Bronchial Tumors (Lung Cancer), Burkitt Lymphoma—see Non-Hodgkin Lymphoma, Carcinoid Tumor (Gastrointestinal), Cardiac (Heart) Tumors, Medulloblastoma and Other CNS Embryonal Tumors, Germ Cell Tumor, Primary CNS Lymphoma, Cervical Cancer, Cholangiocarcinoma, Chordoma, Chronic Lymphocytic Leukemia (CLL), Chronic Myelogenous Leukemia (CML), Chronic Myeloproliferative Neoplasms, Colorectal Cancer, Craniopharyngioma, Cutaneous T-Cell Lymphoma, Ductal Carcinoma In Situ (DCIS), Embryonal Tumors, Medulloblastoma, Endometrial Cancer, Ependymoma, Esophageal Cancer, Esthesioneuroblastoma, Ewing Sarcoma (Bone Cancer), Extracranial Germ Cell Tumor, Extragonadal Germ Cell Tumor, Eye Cancer, Intraocular Melanoma, Retinoblastoma, Fallopian Tube Cancer, Fibrous Histiocytoma of Bone, Malignant, and Osteosarcoma, Gallbladder Cancer, Gastric (Stomach) Cancer, Gastrointestinal Carcinoid Tumor, Gastrointestinal Stromal Tumors (GIST), Germ Cell Tumors, Childhood Extracranial Germ Cell Tumors, Extragonadal Germ Cell Tumors, Ovarian Germ Cell Tumors, Testicular Cancer, Gestational Trophoblastic Disease, Hairy Cell Leukemia, Heart Tumors, Hepatocellular (Liver) Cancer, Histiocytosis, Langerhans Cell Hodgkin Lymphoma, Hypopharyngeal Cancer, Intraocular Melanoma, Islet Cell Tumors, Pancreatic Neuroendocrine Tumors, Kaposi Sarcoma (Soft Tissue Sarcoma), Kidney (Renal Cell) Cancer, Langerhans Cell Histiocytosis, Laryngeal Cancer, Leukemia, Lip and Oral Cavity Cancer, Liver Cancer, Lung Cancer (Non-Small Cell, Small Cell, Pleuropulmonary Blastoma, and Tracheobronchial Tumor), Lymphoma, Male Breast Cancer, Malignant Fibrous Histiocytoma of Bone and Osteosarcoma, Melanoma, Melanoma, Intraocular (Eye), Merkel Cell Carcinoma, Mesothelioma, Metastatic Squamous Neck Cancer with Occult Primary, Midline Tract Carcinoma With NUT Gene Changes, Mouth Cancer, Multiple Endocrine Neoplasia Syndromes, Multiple Myeloma/Plasma Cell Neoplasms, Mycosis Fungoides (Lymphoma), Myelodysplastic Syndromes, Myelodysplastic/Myeloproliferative Neoplasms, Myelogenous Leukemia, Chronic (CML), Myeloid Leukemia, Acute (AML), Myeloproliferative Neoplasms, Chronic Nasal Cavity and Paranasal Sinus Cancer, Nasopharyngeal Cancer, Neuroblastoma, Non-Hodgkin Lymphoma, Non-Small Cell Lung Cancer, Oral Cancer, Lip and Oral Cavity Cancer and Oropharyngeal Cancer, Osteosarcoma and Undifferentiated Pleomorphic Sarcoma of Bone Treatment, Ovarian Cancer, Pancreatic Cancer, Pancreatic Neuroendocrine Tumors (Islet Cell Tumors), Papillomatosis (Childhood Laryngeal), Paraganglioma, Paranasal Sinus and Nasal Cavity Cancer, Parathyroid Cancer, Penile Cancer, Pharyngeal Cancer, Pheochromocytoma, Pituitary Tumor, Plasma Cell Neoplasm/Multiple Myeloma, Pleuropulmonary Blastoma (Lung Cancer), Pregnancy and Breast Cancer, Primary Central Nervous System (CNS) Lymphoma, Primary Peritoneal Cancer, Prostate Cancer, Rectal Cancer, Recurrent Cancer, Renal Cell (Kidney) Cancer, Retinoblastoma, Rhabdomyosarcoma, Salivary Gland Cancer, Sarcoma, Childhood Rhabdomyosarcoma (Soft Tissue Sarcoma), Childhood Vascular Tumors (Soft Tissue Sarcoma), Ewing Sarcoma (Bone Cancer), Osteosarcoma (Bone Cancer), Soft Tissue Sarcoma, Uterine Sarcoma, Sezary Syndrome, Skin Cancer, Small Cell Lung Cancer, Small Intestine Cancer, Squamous Cell Carcinoma, Squamous Neck Cancer with Occult Primary, Metastatic, Stomach (Gastric) Cancer, T-Cell Lymphoma, Testicular Cancer, Throat Cancer, Nasopharyngeal Cancer, Oropharyngeal Cancer, Hypopharyngeal Cancer, Thymoma and Thymic Carcinoma, Thyroid Cancer, Tracheobronchial Tumors (Lung Cancer), Ureter and Renal Pelvis, Transitional Cell Cancer (Kidney (Renal Cell) Cancer, Urethral Cancer, Uterine Cancer, Vaginal Cancer, Vascular Tumors, Vulvar Cancer, Wilms Tumor, Myxofibrosarcoma, Leiomyosarcoma, Pleomorphic Sarcoma and Hepatopancreatobiliary cancer.

[0274] 76. The method according to any one of embodiments 36 to 75, wherein the cancer is prostate cancer.

[0275] 77. The method according to any one of embodiments 73 to 76, wherein the therapy for cancer comprises surgery, brachytherapy, active surveillance, chemotherapy, hormone therapy, immunotherapy and/or radiotherapy.

[0276] 78. The method according to any one of embodiments 73 to 76, wherein the therapy for cancer comprises chemotherapy, hormone therapy and/or immunotherapy.

[0277] 79. The method according to embodiment 77 or embodiment 78, wherein the chemotherapy comprises administration of one or more agents selected from the list: abiraterone acetate, apalutamide, bicalutamide, cabazitaxel, bicalutamide, degarelix, docetaxel, leuprolide acetate, enzalutamide, apalutamide, flutamide, goserelin acetate, mitoxantrone, nilutamide, sipuleucel T, radium 223 dichloride and docetaxel.

[0278] 80. The method according to any one of embodiments 73 to 77, wherein the therapy for cancer comprises resection of all or part of a tumour.

[0279] 81. The method according to any one of embodiments 73 to 77, wherein the cancer is prostate cancer and the therapy for cancer comprises resection of all or part of the prostate gland and/or all or part of a prostate tumour.

[0280] 82. A nucleotide primer comprising a sequence selected from the list SEQ ID NO:1, SEQ ID NO:2, SEQ ID NO:3, SEQ ID NO:4, SEQ ID NO:5, SEQ ID NO:6, SEQ ID NO:7, SEQ ID NO:8, SEQ ID NO:9, SEQ ID NO:10, SEQ ID NO:11, SEQ ID NO:12, SEQ ID NO:13, SEQ ID NO:14, SEQ ID NO:15, SEQ ID NO:16, SEQ ID NO:17, SEQ ID NO:18, SEQ ID NO:19 and SEQ ID NO:20.

[0281] 83. The nucleotide primer according to embodiment 82, consisting of a sequence selected from the list SEQ ID NO:1, SEQ ID NO:2, SEQ ID NO:3, SEQ ID NO:4, SEQ ID NO:5, SEQ ID NO:6, SEQ ID NO:7, SEQ ID NO:8, SEQ ID NO:9, SEQ ID NO:10, SEQ ID NO:11, SEQ ID NO:12, SEQ ID NO:13, SEQ ID NO:14, SEQ ID NO:15, SEQ ID NO:16, SEQ ID NO:17, SEQ ID NO:18, SEQ ID NO:19 and SEQ ID NO:20.

[0282] 84. A kit for determining the presence of one or more bacteria in a biological sample, comprising means for detecting one or more bacteria selected from the genera Fenollaria, Ezakiella, Peptoniphilus, Porphyromonas, Anaerococcus, Varibaculum and Fusobacterium in a biological sample.

[0283] 85. A kit for determining the presence of one or more bacteria in a biological sample, comprising means for detecting one or more bacteria selected from the genera Fenollaria, Peptoniphilus, Porphyromonas, Anaerococcus and Fusobacterium in a biological sample.

[0284] 86. The kit according to embodiment 84 or embodiment 85, wherein the one or more bacteria are selected from: Fenollaria sporofastidiosus, Peptoniphilus rachelemmaiella, Peptoniphilus harei, Peptoniphilus coxii, Anaerococcus prevotii, Anaerococcus lactolyticus, Porphyromonas bobii, Porphyromonas asaccharolytica, Porphyromonas bennonis and Fusobacterium nucleatum.

[0285] 87. The kit according to any one of embodiments 84 to 86, wherein the one or more bacteria are selected from: Fenollaria sporofastidiosus, Peptoniphilus rachelemmaiella, Peptoniphilus harei, Anaerococcus prevotii, Porphyromonas bobii, Porphyromonas asaccharolytica and Fusobacterium nucleatum.

[0286] 88. The kit according to any one of embodiments 84 to 86, wherein the one or more bacteria are selected from: Fenollaria sporofastidiosus, Peptoniphilus rachelemmaiella, Anaerococcus prevotii, Porphyromonas bobii, Porphyromonas asaccharolytica and Fusobacterium nucleatum.

[0287] 89. The kit according to any one of embodiments 84 to 86, wherein the one or more bacteria are selected from: Fenollaria sporofastidiosus, Peptoniphilus harei, Anaerococcus prevotii, Porphyromonas bobii, Porphyromonas asaccharolytica and Fusobacterium nucleatum.

[0288] 90. The kit according to any one of embodiments 84 to 86, wherein the one or more bacteria are selected from: Fenollaria sporofastidiosus, Peptoniphilus rachelemmaiella, Peptoniphilus harei, Anaerococcus prevotii, Porphyromonas asaccharolytica and Fusobacterium nucleatum.

[0289] 91. The kit according to any one of embodiments 84 to 86, wherein the one or more bacteria are selected from: Fenollaria sporofastidiosus, Peptoniphilus rachelemmaiella, Peptoniphilus harei, Anaerococcus prevotii, Porphyromonas bobii and Fusobacterium nucleatum.

[0290] 92. The kit according to any one of embodiments 84 to 86, wherein the one or more bacteria are selected from: Fenollaria sporofastidiosus, Peptoniphilus rachelemmaiella, Anaerococcus prevotii, Porphyromonas bobii and Fusobacterium nucleatum.

[0291] 93. The kit according to any one of embodiments 84 to 86, wherein the one or more bacteria are selected from: Fenollaria sporofastidiosus, Peptoniphilus rachelemmaiella, Anaerococcus prevotii, Porphyromonas asaccharolytica and Fusobacterium nucleatum.

[0292] 94. The kit according to any one of embodiments 84 to 86, wherein the one or more bacteria are selected from: Fenollaria sporofastidiosus, Peptoniphilus harei, Anaerococcus prevotii, Porphyromonas bobii and Fusobacterium nucleatum.

[0293] 95. The kit according to any one of embodiments 84 to 86, wherein the one or more bacteria are selected from: Fenollaria sporofastidiosus, Peptoniphilus harei, Anaerococcus prevotii, Porphyromonas asaccharolytica and Fusobacterium nucleatum.

[0294] 96. The kit according to any one of embodiments 84 to 95, wherein the kit comprises means for detecting the presence of at least 1, 2, 3, 4, 5, 6, 7, 8, 9 or 10 different bacteria.

[0295] 97. The kit according to any one of embodiments 84 to 96, wherein the kit comprises means for detecting all of the species recited in a given list.

[0296] 98. The kit according to any one of embodiments 84 to 86, wherein the kit comprises means for detecting each of Fenollaria sporofastidiosus, Peptoniphilus rachelemmaiella, Peptoniphilus harei, Peptoniphilus coxii, Anaerococcus prevotii, Anaerococcus lactolyticus, Porphyromonas bobii, Porphyromonas asaccharolytica, Porphyromonas bennonis and Fusobacterium nucleatum.

[0297] 99. The kit according to any one of embodiments 84, 85 or 87, wherein the kit comprises means for detecting each of Fenollaria sporofastidiosus, Peptoniphilus rachelemmaiella, Peptoniphilus harei, Anaerococcus prevotii, Porphyromonas bobii, Porphyromonas asaccharolytica and Fusobacterium nucleatum.

[0298] 100. The kit according to any one of embodiments 84 to 97 or 99, further comprising means for detecting the presence of one or more bacteria selected from Peptoniphilus coxii, Anaerococcus lactolyticus and Porphyromonas bennonis.

[0299] 101. The kit according to any one of embodiments 84 to 100, further comprising means for detecting the presence of Varibaculum prostatecancerukia.

[0300] 102. The kit according to any one of embodiments 84 to 101, wherein one or more of the bacteria are selected from: Fenollaria sporofastidiosus (identified by ECACC accession number 21092201 or DSMZ accession number DSM 34056), Peptoniphilus rachelemmaiella (identified by ECACC accession number 21092202 or DSMZ accession number DSM 34055) and Porphyromonas bobii (identified by ECACC accession number 21092204 or DSMZ accession number DSM 34063).

[0301] 103. The kit according to any one of embodiments 84 to 102, wherein the bacteria is Varibaculum prostatecancerukia (identified by ECACC accession number 21092203 or DSMZ accession number DSM 34057).

[0302] 104. The kit according to any one of embodiments 84 to 103, wherein the means for detecting is a biosensor or specific binding molecule.

[0303] 105. The kit according to embodiment 104, wherein the biosensor is an electrochemical, electronic, piezoelectric, gravimetric, pyroelectric biosensor, ion channel switch, evanescent wave, surface plasmon resonance or biological biosensor.

[0304] 106. The kit according to embodiment 104 or 105 wherein the biosensor is an antigen-specific binding molecule capable of specifically binding to the one or more bacteria, optionally wherein the antigen-specific binding molecule is an antibody or fragment thereof.

[0305] 107. The kit according to any one of embodiments 84 to 103, wherein the means for detecting is quantitative polymerase chain reaction (qPCR) or a probe-based detection assay (such as NanoString®).

[0306] 108. The kit according to embodiment 107, wherein the means for detecting is quantitative polymerase chain reaction (qPCR) or a probe-based detection assay (such as NanoString®) and the kit comprises one or more primers comprising a nucleotide sequence selected from the list SEQ ID NO:1, SEQ ID NO:2, SEQ ID NO:3, SEQ ID NO:4, SEQ ID NO:5, SEQ ID NO:6, SEQ ID NO:7, SEQ ID NO:8, SEQ ID NO:9, SEQ ID NO:10, SEQ ID NO:11, SEQ ID NO:12, SEQ ID NO:13, SEQ ID NO:14, SEQ ID NO:15, SEQ ID NO:16, SEQ ID NO:17, SEQ ID NO:18, SEQ ID NO:19 and SEQ ID NO:20.

[0307] 109. The kit according to embodiment 107 or 108, wherein the means for detecting is quantitative polymerase chain reaction (qPCR) or a probe-based detection assay (such as NanoString®) and the kit comprises one or more primers consisting of a nucleotide sequence selected from the list SEQ ID NO:1, SEQ ID NO:2, SEQ ID NO:3, SEQ ID NO:4, SEQ ID NO:5, SEQ ID NO:6, SEQ ID NO:7, SEQ ID NO:8, SEQ ID NO:9, SEQ ID NO:10, SEQ ID NO:11, SEQ ID NO:12, SEQ ID NO:13, SEQ ID NO:14, SEQ ID NO:15, SEQ ID NO:16, SEQ ID NO:17, SEQ ID NO:18, SEQ ID NO:19 and SEQ ID NO:20.

[0308] 110. A cell culture comprising bacteria Varibaculum prostatecancerukia identified by ECACC deposit number 21092203 or DSMZ accession number DSM 34057.

[0309] 111. A cell culture comprising bacteria Fenollaria sporofastidiosus identified by ECACC deposit number 21092201 or DSMZ accession number DSM 34056.

[0310] 112. A cell culture comprising bacteria Peptoniphilus rachelemmaiella identified by ECACC deposit number 21092202 or DSMZ accession number DSM 34055.

[0311] 113. A cell culture comprising bacteria Porphyromonas bobii identified by ECACC deposit number 21092204 or DSMZ accession number DSM 34063.

[0312] 114. Use of a cell culture according to any one of embodiments 110 to 113 in providing a prognosis of cancer in a patient.

[0313] 115. A computer apparatus configured to perform a method according to any one of embodiments 1 to 72 or, a computer readable medium programmed to perform a method according to any one of embodiments 1 to 72.

[0314] 116. The method according to any one of embodiments 1 to 4, wherein one or more of the bacteria comprise 1, 2, 3, 4, 5, 6 or 7 bacteria selected from: Fenollaria sporofastidiosus, Peptoniphilus rachelemmaiella, Peptoniphilus harei, Anaerococcus prevotii, Porphyromonas bobii, Porphyromonas asaccharolytica and Fusobacterium nucleatum.

[0315] 117. The method according to any one of embodiments 1 to 4, wherein one or more of the bacteria comprise 2 bacteria selected from: Fenollaria sporofastidiosus, Peptoniphilus rachelemmaiella, Peptoniphilus harei, Anaerococcus prevotii, Porphyromonas bobii, Porphyromonas asaccharolytica and Fusobacterium nucleatum.

[0316] 118. The method according to any one of embodiments 1 to 4, wherein one or more of the bacteria comprise 3 bacteria selected from: Fenollaria sporofastidiosus, Peptoniphilus rachelemmaiella, Peptoniphilus harei, Anaerococcus prevotii, Porphyromonas bobii, Porphyromonas asaccharolytica and Fusobacterium nucleatum.

[0317] 119. The method according to any one of embodiments 1 to 4, wherein one or more of the bacteria comprise 4 bacteria selected from: Fenollaria sporofastidiosus, Peptoniphilus rachelemmaiella, Peptoniphilus harei, Anaerococcus prevotii, Porphyromonas bobii, Porphyromonas asaccharolytica and Fusobacterium nucleatum.

[0318] 120. The method according to any one of embodiments 1 to 4, wherein one or more of the bacteria comprise 5 bacteria selected from: Fenollaria sporofastidiosus, Peptoniphilus rachelemmaiella, Peptoniphilus harei, Anaerococcus prevotii, Porphyromonas bobii, Porphyromonas asaccharolytica and Fusobacterium nucleatum.

[0319] 121. The method according to any one of embodiments 1 to 4, wherein one or more of the bacteria comprise 6 bacteria selected from: Fenollaria sporofastidiosus, Peptoniphilus rachelemmaiella, Peptoniphilus harei, Anaerococcus prevotii, Porphyromonas bobii, Porphyromonas asaccharolytica and Fusobacterium nucleatum.

[0320] 122. The method according to any one of embodiments 1 to 4, wherein one or more of the bacteria comprise all 7 bacteria Fenollaria sporofastidiosus, Peptoniphilus rachelemmaiella, Peptoniphilus harei, Anaerococcus prevotii, Porphyromonas bobii, Porphyromonas asaccharolytica and Fusobacterium nucleatum.

[0321] 123. A nucleotide primer comprising a sequence between 5 and 25 nucleotides in length that is substantially complementary or reverse complementary to a corresponding length portion of SEQ ID NO:25.

[0322] 124. The nucleotide primer according to embodiment 123, wherein the primer is capable of detecting the presence of Varibaculum prostatecancerukia in a biological sample.

[0323] 125. A nucleotide primer comprising a sequence between 5 and 25 nucleotides in length that is substantially complementary or reverse complementary to a corresponding length portion of SEQ ID NO:26.

[0324] 126. The nucleotide primer according to embodiment 125, wherein the primer is capable of detecting the presence of Fenollaria sporofastidiosus in a biological sample.

[0325] 127. A nucleotide primer comprising a sequence between 5 and 25 nucleotides in length that is substantially complementary or reverse complementary to a corresponding length portion of a sequence selected from the list consisting of SEQ ID NOs:27-67.

[0326] 128. The nucleotide primer according to embodiment 127, wherein the primer is capable of detecting the presence of Peptoniphilus rachelemmaiella in a biological sample.

[0327] 129. A nucleotide primer comprising a sequence between 5 and 25 nucleotides in length that is substantially complementary or reverse complementary to a corresponding length portion of a sequence selected from the list consisting of SEQ ID NOs:68-84.

[0328] 130. The nucleotide primer according to embodiment 129, wherein the primer is capable of detecting the presence of Porphyromonas bobii in a biological sample.

[0329] 131. The method according to any one of embodiments 1 to 72, wherein the presence of the one or more bacteria is determined using quantitative polymerase chain reaction (qPCR) or a probe-based detection assay (such as NanoString®) using one or more primers according to embodiments 123 to 130.

[0330] 132. The kit according to any one of embodiments 84 to 109, wherein the means for detecting is quantitative polymerase chain reaction (qPCR) or a probe-based detection assay (such as NanoString®) using one or more primers according to embodiments 123 to 130.

[0331] 133. A method of detecting the presence of one or more bacteria selected from the genera Fenollaria, Peptoniphilus, Porphyromonas, Anaerococcus, Varibaculum, Fusobacterium, Prevotella, Propionimicrobium, Campylobacter in a biological sample from the patient.

[0332] 134. A method of detecting the presence of one or more bacteria selected from the genera Fenollaria, Peptoniphilus, Porphyromonas, Anaerococcus and Prevotella in a biological sample from the patient.

[0333] 135. The method according to embodiment 133 or embodiment 134, wherein the one or more bacteria are selected from: Fenollaria sporofastidiosus, Peptoniphilus rachelemmaiella, Peptoniphilus coxii, Peptoniphilus duerdenii, Peptoniphilus harei, Porphyromonas sp., Porphyromonas bobii, Porphyromonas asaccharolytica, Porphyromonas bennonis, Anaerococcus prevotii, Anaerococcus lactolyticus, Fusobacterium nucleatum, Varibaculum prostatecancerukia, Prevotella sp., Prevotella timonesis, Propionimicrobium lymphophilum and Campylobacter ureolyticus.

[0334] 136. The method according to any one of embodiments 133 to 135, wherein the one or more bacteria are selected from: Fenollaria sporofastidiosus, Peptoniphilus rachelemmaiella, Peptoniphilus harei, Peptoniphilus coxii, Anaerococcus prevotii, Anaerococcus lactolyticus, Porphyromonas bobii, Porphyromonas asaccharolytica, Porphyromonas bennonis, Prevotella timonesis and Fusobacterium nucleatum.

[0335] 137. The method according to any one of embodiments 133 to 135, wherein the one or more bacteria are selected from: Fenollaria sporofastidiosus, Peptoniphilus rachelemmaiella, Peptoniphilus harei, Anaerococcus prevotii, Porphyromonas bobii, Porphyromonas asaccharolytica, Prevotella timonesis and Fusobacterium nucleatum.

[0336] 138. The method according to any one of embodiments 133 to 135, wherein the one or more bacteria are selected from: Fenollaria sporofastidiosus, Peptoniphilus rachelemmaiella, Anaerococcus prevotii, Porphyromonas bobii, Porphyromonas asaccharolytica, Prevotella timonesis and Fusobacterium nucleatum.

[0337] 139. The method according to any one of embodiments 133 to 135, wherein the one or more bacteria are selected from: Fenollaria sporofastidiosus, Peptoniphilus harei, Anaerococcus prevotii, Porphyromonas bobii, Porphyromonas asaccharolytica, Prevotella timonesis and Fusobacterium nucleatum.

[0338] 140. The method according to any one of embodiments 133 to 135, wherein the one or more bacteria are selected from: Fenollaria sporofastidiosus, Peptoniphilus rachelemmaiella, Peptoniphilus harei, Anaerococcus prevotii, Porphyromonas asaccharolytica, Prevotella timonesis and Fusobacterium nucleatum.

[0339] 141. The method according to any one of embodiments 133 to 135, wherein the one or more bacteria are selected from: Fenollaria sporofastidiosus, Peptoniphilus rachelemmaiella, Peptoniphilus harei, Anaerococcus prevotii, Porphyromonas bobii, Prevotella timonesis and Fusobacterium nucleatum.

[0340] 140. The method according to any one of embodiments 133 to 135, wherein the one or more bacteria are selected from: Fenollaria sporofastidiosus, Peptoniphilus rachelemmaiella, Anaerococcus prevotii, Porphyromonas bobii, Prevotella timonesis and Fusobacterium nucleatum.

[0341] 141. The method according to any one of embodiments 133 to 135, wherein the one or more bacteria are selected from: Fenollaria sporofastidiosus, Peptoniphilus rachelemmaiella, Anaerococcus prevotii, Porphyromonas asaccharolytica, Prevotella timonesis and Fusobacterium nucleatum.

[0342] 142. The method according to any one of embodiments 133 to 135, wherein the one or more bacteria are selected from: Fenollaria sporofastidiosus, Peptoniphilus harei, Anaerococcus prevotii, Porphyromonas bobii, Prevotella timonesis and Fusobacterium nucleatum.

[0343] 143. The method according to any one of embodiments 133 to 135, wherein the one or more bacteria are selected from: Fenollaria sporofastidiosus, Peptoniphilus harei, Anaerococcus prevotii, Porphyromonas asaccharolytica, Prevotella timonesis and Fusobacterium nucleatum.

[0344] 144. The method according to any one of embodiments 133 to 143, wherein the method comprises detecting the presence of at least 1, 2, 3, 4, 5, 6, 7, 8, 9 or 10 different bacterial species and/or genera.

[0345] 145. The method according to any one of embodiments 133 to 144, wherein the method comprises detecting all of the species and/or genera recited in a given list.

[0346] 146. The method according to any one of embodiments 133 to 135 wherein the method comprises detecting each of Fenollaria sporofastidiosus, Peptoniphilus rachelemmaiella, Peptoniphilus coxii, Peptoniphilus duerdenii, Peptoniphilus harei, Porphyromonas sp., Porphyromonas bobii, Porphyromonas asaccharolytica, Porphyromonas bennonis, Anaerococcus prevotii, Anaerococcus lactolyticus, Fusobacterium nucleatum, Varibaculum prostatecancerukia, Prevotella sp., Prevotella timonesis, Propionimicrobium lymphophilum and Campylobacter ureolyticus.

[0347] 147. The method according to any one of embodiments 133 to 136, wherein the method comprises detecting each of Fenollaria sporofastidiosus, Peptoniphilus rachelemmaiella, Peptoniphilus harei, Peptoniphilus coxii, Anaerococcus prevotii, Anaerococcus lactolyticus, Porphyromonas bobii, Porphyromonas asaccharolytica, Porphyromonas bennonis, Prevotella timonesis and Fusobacterium nucleatum.

[0348] 148. The method according to any one of embodiments 133 to 147, wherein the presence of the one or more bacteria is determined using quantitative polymerase chain reaction (qPCR) or a probe-based detection assay (such as NanoString®) using one or more primers comprising a nucleotide sequence selected from the list of SEQ ID NO: 85, SEQ ID NO: 86, SEQ ID NO: 87, SEQ ID NO: 88, SEQ ID NO: 89, SEQ ID NO: 90, SEQ ID NO: 91, SEQ ID NO: 92, SEQ ID NO: 93, SEQ ID NO: 94, SEQ ID NO: 95, SEQ ID NO: 96, SEQ ID NO: 97, SEQ ID NO: 98.

[0349] 149. The method according to any one of embodiments 133 to 148, wherein the presence of the one or more bacteria is determined using quantitative polymerase chain reaction (qPCR) or a probe-based detection assay (such as NanoString®) using one or more primers consisting of a nucleotide sequence selected from the list of SEQ ID NO: 85, SEQ ID NO: 86, SEQ ID NO: 87, SEQ ID NO: 88, SEQ ID NO: 89, SEQ ID NO: 90, SEQ ID NO: 91, SEQ ID NO: 92, SEQ ID NO: 93, SEQ ID NO: 94, SEQ ID NO: 95, SEQ ID NO: 96, SEQ ID NO: 97, SEQ ID NO: 98.

[0350] 150. A method of providing a cancer prognosis in a patient based on the presence of one or more bacteria in a biological sample from the patient, comprising:
[0351] (a) detecting the presence of one or more bacteria selected from the genera Fenollaria, Peptoniphilus, Porphyromonas, Anaerococcus, Varibaculum, Fusobacterium, Prevotella, Propionimicrobium, Campylobacter in a biological sample from the patient, and
[0352] (b) providing a prognosis for the patient, wherein the patient has a poor prognosis if one or more of the bacteria are present in the biological sample.

[0353] 151. The method according to embodiment 150, wherein the one or more bacteria are selected from: Fenollaria sporofastidiosus, Peptoniphilus rachelemmaiella, Peptoniphilus coxii, Peptoniphilus duerdenii, Peptoniphilus harei, Porphyromonas sp., Porphyromonas bobii, Porphyromonas asaccharolytica, Porphyromonas bennonis, Anaerococcus prevotii, Anaerococcus lactolyticus, Fusobacterium nucleatum, Varibaculum prostatecancerukia, Prevotella sp., Prevotella timonesis, Propionimicrobium lymphophilum and Campylobacter ureolyticus.

[0354] 152. The method according to any one of embodiments 150 to 151, wherein the one or more bacteria are selected from: Fenollaria sporofastidiosus, Peptoniphilus rachelemmaiella, Peptoniphilus harei, Peptoniphilus coxii, Anaerococcus prevotii, Anaerococcus lactolyticus, Porphyromonas bobii, Porphyromonas asaccharolytica, Porphyromonas bennonis, Prevotella timonesis and Fusobacterium nucleatum.

[0355] 153. The method according to any one of embodiments 150 to 151, wherein the one or more bacteria are selected from: Fenollaria sporofastidiosus, Peptoniphilus rachelemmaiella, Peptoniphilus harei, Anaerococcus prevotii, Porphyromonas bobii, Porphyromonas asaccharolytica, Prevotella timonesis and Fusobacterium nucleatum.

[0356] 154. The method according to any one of embodiments 150 to 151, wherein the one or more bacteria are selected from: Fenollaria sporofastidiosus, Peptoniphilus rachelemmaiella, Anaerococcus prevotii, Porphyromonas bobii, Porphyromonas asaccharolytica, Prevotella timonesis and Fusobacterium nucleatum.

[0357] 155. The method according to any one of embodiments 150 to 151, wherein the one or more bacteria are selected from: Fenollaria sporofastidiosus, Peptoniphilus harei, Anaerococcus prevotii, Porphyromonas bobii, Porphyromonas asaccharolytica, Prevotella timonesis and Fusobacterium nucleatum.

[0358] 156. The method according to any one of embodiments 150 to 151, wherein the one or more bacteria are selected from: Fenollaria sporofastidiosus, Peptoniphilus rachelemmaiella, Peptoniphilus harei, Anaerococcus prevotii, Porphyromonas asaccharolytica, Prevotella timonesis and Fusobacterium nucleatum.

[0359] 157. The method according to any one of embodiments 150 to 151, wherein the one or more bacteria are selected from: Fenollaria sporofastidiosus, Peptoniphilus rachelemmaiella, Peptoniphilus harei, Anaerococcus prevotii, Porphyromonas bobii, Prevotella timonesis and Fusobacterium nucleatum.

[0360] 158. The method according to any one of embodiments 150 to 151, wherein the one or more bacteria are selected from: Fenollaria sporofastidiosus, Peptoniphilus rachelemmaiella, Anaerococcus prevotii, Porphyromonas bobii, Prevotella timonesis and Fusobacterium nucleatum.

[0361] 159. The method according to any one of embodiments 150 to 151, wherein the one or more bacteria are selected from: Fenollaria sporofastidiosus, Peptoniphilus rachelemmaiella, Anaerococcus prevotii, Porphyromonas asaccharolytica, Prevotella timonesis and Fusobacterium nucleatum.

[0362] 160. The method according to any one of embodiments 150 to 151, wherein the one or more bacteria are selected from: Fenollaria sporofastidiosus, Peptoniphilus harei, Anaerococcus prevotii, Porphyromonas bobii, Prevotella timonesis and Fusobacterium nucleatum.

[0363] 161. The method according to any one of embodiments 150 to 151, wherein the one or more bacteria are selected from: Fenollaria sporofastidiosus, Peptoniphilus harei, Anaerococcus prevotii, Porphyromonas asaccharolytica, Prevotella timonesis and Fusobacterium nucleatum.

[0364] 162. The method according to any one of embodiments 150 to 161, wherein the method comprises detecting the presence of at least 1, 2, 3, 4, 5, 6, 7, 8, 9 or 10 different bacterial species and/or genera.

[0365] 163. The method according to any one of embodiments 150 to 162, wherein the method comprises detecting all of the species and/or genera recited in a given list.

[0366] 164. A method of treating a cancer in a patient in need thereof, comprising providing a prognosis of a patient's cancer using a method as defined in any one of embodiments 150 to 163, and administering to the patient a therapy for treating cancer.

[0367] 165. A method of treating cancer in a patient in need thereof, wherein the prognosis of the patient has been determined according to a method as defined in any one of embodiments 150 to 163, comprising administering to the patient a therapy for treating cancer.

[0368] 166. The method according to any one of embodiments 150 to 165 wherein the cancer is selected from the list: Acute Lymphoblastic Leukemia (ALL), Acute Myeloid Leukemia (AML), Adrenocortical Carcinoma, Kaposi Sarcoma (Soft Tissue Sarcoma), AIDS-Related Lymphoma (Lymphoma), Primary CNS Lymphoma (Lymphoma), Anal Cancer, Appendix Cancer, Astrocytomas, Atypical Teratoid/Rhabdoid Tumor, Central Nervous System (Brain Cancer), Basal Cell Carcinoma, Bile Duct Cancer, Bladder Cancer, Bone Cancer (includes Ewing Sarcoma and Osteosarcoma and Malignant Fibrous Histiocytoma), Brain Tumors, Breast Cancer, Bronchial Tumors (Lung Cancer), Burkitt Lymphoma—see Non-Hodgkin Lymphoma, Carcinoid Tumor (Gastrointestinal), Cardiac (Heart) Tumors, Medulloblastoma and Other CNS Embryonal Tumors, Germ Cell Tumor, Primary CNS Lymphoma, Cervical Cancer, Cholangiocarcinoma, Chordoma, Chronic Lymphocytic Leukemia (CLL), Chronic Myelogenous Leukemia (CML), Chronic Myeloproliferative Neoplasms, Colorectal Cancer, Craniopharyngioma, Cutaneous T-Cell Lymphoma, Ductal Carcinoma In Situ (DCIS), Embryonal Tumors, Medulloblastoma, Endometrial Cancer, Ependymoma, Esophageal Cancer, Esthesioneuroblastoma, Ewing Sarcoma (Bone Cancer), Extracranial Germ Cell Tumor, Extragonadal Germ Cell Tumor, Eye Cancer, Intraocular Melanoma, Retinoblastoma, Fallopian Tube Cancer, Fibrous Histiocytoma of Bone, Malignant, and Osteosarcoma, Gallbladder Cancer, Gastric (Stomach) Cancer, Gastrointestinal Carcinoid Tumor, Gastrointestinal Stromal Tumors (GIST), Germ Cell Tumors, Childhood Extracranial Germ Cell Tumors, Extragonadal Germ Cell Tumors, Ovarian Germ Cell Tumors, Testicular Cancer, Gestational Trophoblastic Disease, Hairy Cell Leukemia, Heart Tumors, Hepatocellular (Liver) Cancer, Histiocytosis, Langerhans Cell Hodgkin Lymphoma, Hypopharyngeal Cancer, Intraocular Melanoma, Islet Cell Tumors, Pancreatic Neuroendocrine Tumors, Kaposi Sarcoma (Soft Tissue Sarcoma), Kidney (Renal Cell) Cancer, Langerhans Cell Histiocytosis, Laryngeal Cancer, Leukemia, Lip and Oral Cavity Cancer, Liver Cancer, Lung Cancer (Non-Small Cell, Small Cell, Pleuropulmonary Blastoma, and Tracheobronchial Tumor), Lymphoma, Male Breast Cancer, Malignant Fibrous Histiocytoma of Bone and Osteosarcoma, Melanoma, Melanoma, Intraocular (Eye), Merkel Cell Carcinoma, Mesothelioma, Metastatic Squamous Neck Cancer with Occult Primary, Midline Tract Carcinoma With NUT Gene Changes, Mouth Cancer, Multiple Endocrine Neoplasia Syndromes, Multiple Myeloma/Plasma Cell Neoplasms, Mycosis Fungoides (Lymphoma), Myelodysplastic Syndromes, Myelodysplastic/Myeloproliferative Neoplasms, Myelogenous Leukemia, Chronic (CML), Myeloid Leukemia, Acute (AML), Myeloproliferative Neoplasms, Chronic Nasal Cavity and Paranasal Sinus Cancer, Nasopharyngeal Cancer, Neuroblastoma, Non-Hodgkin Lymphoma, Non-Small Cell Lung Cancer, Oral Cancer, Lip and Oral Cavity Cancer and Oropharyngeal Cancer, Osteosarcoma and Undifferentiated Pleomorphic Sarcoma of Bone Treatment, Ovarian Cancer, Pancreatic Cancer, Pancreatic Neuroendocrine Tumors (Islet Cell Tumors), Papillomatosis (Childhood Laryngeal), Paraganglioma, Paranasal Sinus and Nasal Cavity Cancer, Parathyroid Cancer, Penile Cancer, Pharyngeal Cancer, Pheochromocytoma, Pituitary Tumor, Plasma Cell Neoplasm/Multiple Myeloma, Pleuropulmonary Blastoma (Lung Cancer), Pregnancy and Breast Cancer, Primary Central Nervous System (CNS) Lymphoma, Primary Peritoneal Cancer, Prostate Cancer, Rectal Cancer, Recurrent Cancer, Renal Cell (Kidney) Cancer, Retinoblastoma, Rhabdomyosarcoma, Salivary Gland Cancer, Sarcoma, Childhood Rhabdomyosarcoma (Soft Tissue Sarcoma), Childhood Vascular Tumors (Soft Tissue Sarcoma), Ewing Sarcoma (Bone Cancer), Osteosarcoma (Bone Cancer), Soft Tissue Sarcoma, Uterine Sarcoma, Sezary Syndrome, Skin Cancer, Small Cell Lung Cancer, Small Intestine Cancer, Squamous Cell Carcinoma, Squamous Neck Cancer with Occult Primary, Metastatic, Stomach (Gastric) Cancer, T-Cell Lymphoma, Testicular Cancer, Throat Cancer, Nasopharyngeal Cancer, Oropharyngeal Cancer, Hypopharyngeal Cancer, Thymoma and Thymic Carcinoma, Thyroid Cancer, Tracheobronchial Tumors (Lung Cancer), Ureter and Renal Pelvis, Transitional Cell Cancer (Kidney (Renal Cell) Cancer, Urethral Cancer, Uterine Cancer, Vaginal Cancer, Vascular Tumors, Vulvar Cancer, Wilms Tumor, Myxofibrosarcoma, Leiomyosarcoma, Pleomorphic Sarcoma and Hepatopancreatobiliary cancer.

[0369] 167. The method according to any one of embodiments 150 to 166, wherein the cancer is prostate cancer.

[0370] 168. A nucleotide primer comprising a sequence selected from the list of SEQ ID NO: 85, SEQ ID NO: 86, SEQ ID NO: 87, SEQ ID NO: 88, SEQ ID NO: 89, SEQ ID NO: 90, SEQ ID NO: 91, SEQ ID NO: 92, SEQ ID NO: 93, SEQ ID NO: 94, SEQ ID NO: 95, SEQ ID NO: 96, SEQ ID NO: 97, SEQ ID NO: 98.

[0371] 169. The nucleotide primer according to embodiment 168, consisting of a sequence selected from the list of SEQ ID NO: 85, SEQ ID NO: 86, SEQ ID NO: 87, SEQ ID NO: 88, SEQ ID NO: 89, SEQ ID NO: 90, SEQ ID NO: 91, SEQ ID NO: 92, SEQ ID NO: 93, SEQ ID NO: 94, SEQ ID NO: 95, SEQ ID NO: 96, SEQ ID NO: 97, SEQ ID NO: 98.

[0372] 170. A kit for determining the presence of one or more bacteria in a biological sample, comprising means for detecting one or more bacteria selected from the genera Fenollaria, Peptoniphilus, Porphyromonas, Anaerococcus, Varibaculum, Fusobacterium, Prevotella, Propionimicrobium, Campylobacter in a biological sample.

[0373] 171. The kit according to embodiment 170, wherein the one or more bacteria are selected from: Fenollaria sporofastidiosus, Peptoniphilus rachelemmaiella, Peptoniphilus coxii, Peptoniphilus duerdenii, Peptoniphilus harei, Porphyromonas sp., Porphyromonas bobii, Porphyromonas asaccharolytica, Porphyromonas bennonis, Anaerococcus prevotii, Anaerococcus lactolyticus, Fusobacterium nucleatum, Varibaculum prostatecancerukia, Prevotella sp., Prevotella timonesis, Propionimicrobium lymphophilum and Campylobacter ureolyticus.

[0374] 172. A computer apparatus configured to perform a method according to any one of embodiments 133 to 171 or, a computer readable medium programmed to perform a method according to any one of embodiments 133 to 171.

[0375] 173. A method of detecting the presence of Prevotella timonesis in a biological sample.

[0376] 174. The method according to embodiment 174, wherein the presence of the bacteria is determined using quantitative polymerase chain reaction (qPCR) or a probe-based detection assay (such as NanoString®) using one or more primers comprising a nucleotide sequence selected from SEQ ID NO: 95, SEQ ID NO: 96, SEQ ID NO: 97 and SEQ ID NO: 98.

[0377] 175. The method according to embodiment 174, wherein the presence of the bacteria is determined using quantitative polymerase chain reaction (qPCR) or a probe-based detection assay (such as NanoString®) using one or more primers comprising a nucleotide sequence selected from SEQ ID NO: 95, SEQ ID NO: 96, SEQ ID NO: 97 and SEQ ID NO: 98.

[0378] 176. A method of providing a cancer prognosis in a patient based on the presence of Prevotella timonesis in a biological sample from the patient, comprising:
[0379] (a) detecting the presence of Prevotella timonesis in a biological sample from the patient, and
[0380] (b) providing a prognosis for the patient, wherein the patient has a poor prognosis if Prevotella timonesis is present in the biological sample.

[0381] 177. A method of treating a cancer in a patient in need thereof, comprising providing a prognosis of a patient's cancer using a method as defined in embodiment 176, and administering to the patient a therapy for treating cancer.

[0382] 178. A method of treating cancer in a patient in need thereof, wherein the prognosis of the patient has been determined according to a method as defined in embodiment 177, comprising administering to the patient a therapy for treating cancer.

[0383] 179. The method according to any one of embodiments 176 to 178, wherein the cancer is prostate cancer.

[0384] 180. A nucleotide primer comprising a sequence between 5 and 25 nucleotides in length that is substantially complementary or reverse complementary to a corresponding length portion of Prevotella timonesis.

[0385] 181. A nucleotide primer comprising a sequence between 5 and 25 nucleotides in length that is substantially complementary or reverse complementary to a corresponding length portion of Prevotella timonesis 4401737.

[0386] 182. A nucleotide primer comprising a sequence between 5 and 25 nucleotides in length that is substantially complementary or reverse complementary to a corresponding length portion of a sequence selected from the list consisting of SEQ ID NOs:99-120.

[0387] 183. The nucleotide primer according to embodiment 182, wherein the primer is capable of detecting the presence of Prevotella timonesis in a biological sample.

[0388] 184. The method according to any one of embodiments 133 to 167 or 176 to 179, wherein the presence of the one or more bacteria is determined using quantitative polymerase chain reaction (qPCR) or a probe-based detection assay (such as NanoString®) using one or more primers according to embodiments 180 to 183.

[0389] 185. A kit for determining the presence of Prevotella timonesis in a biological sample.

[0390] 186. The kit according to embodiment 185, wherein the means for detecting is quantitative polymerase chain reaction (qPCR) or a probe-based detection assay (such as NanoString®).

[0391] 187. The kit according to embodiment 186, wherein the means for detecting is quantitative polymerase chain reaction (qPCR) or a probe-based detection assay (such as NanoString®) and the kit comprises one or more primers comprising a nucleotide sequence selected from SEQ ID NO: 95, SEQ ID NO: 96, SEQ ID NO: 97 and SEQ ID NO: 98.

[0392] 188. The kit according to embodiment 186 and 187, wherein the means for detecting is quantitative polymerase chain reaction (qPCR) or a probe-based detection assay (such as NanoString®) and the kit comprises one or more primers consisting of a nucleotide sequence selected from SEQ ID NO: 95, SEQ ID NO: 96, SEQ ID NO: 97 and SEQ ID NO: 98.

[0393] 189. The kit according to embodiment 187 and 187, wherein the means for detecting is quantitative polymerase chain reaction (qPCR) or a probe-based detection assay (such as NanoString®) and the kit comprises one or more primers comprising a sequence between 5 and 25 nucleotides in length that is substantially complementary or reverse complementary to a corresponding length portion of a sequence selected from the list consisting of SEQ ID NOs:99-120.

[0394] It will be apparent to those skilled in the art that various modifications and variations can be made to the compositions and processes of this invention. Thus, it is intended that the present invention cover such modifications and variations, provided they come within the scope of the appended claims and their equivalents.

[0395] All publications, patents and patent applications mentioned in this specification are herein incorporated in their entirety by reference into the specification, to the same extent as if each individual publication, patent or patent application was specifically and individually indicated to be incorporated herein by reference. In addition, citation or identification of any reference in this application shall not be construed as an admission that such reference is available as prior art to the present invention. To the extent that section headings are used, they should not be construed as necessarily limiting.

### REFERENCES

[0396] [1] Cancer Research UK. Prostate cancer incidence statistics [Internet]. 2019 [cited 2019 Jun. 29]. Available from: http://www.cancerresearchuk.org/health-professional/cancer-statistics/statistics-by-cancer-type/prostate-cancer/incidence
[0397] [2] Sanda M G, Cadeddu J A, Kirkby E, Chen R C, Crispino T, Fontanarosa J, et al. Clinically Localized Prostate Cancer: AUA/ASTRO/SUO Guideline. Part I: Risk Stratification, Shared Decision Making, and Care Options. Journal of Urology [Internet]. 2018; 199(3):683-90. Available from: https://doi.org/10.1016/j.juro.2017.11.095
[0398] [3] Cornford P, Bellmunt J, Bolla M, Briers E, De Santis M, Gross T, et al. EAU-ESTRO-SIOG Guidelines on Prostate Cancer. Part II: Treatment of Relapsing, Metastatic, and Castration-Resistant Prostate Cancer. European Urology [Internet]. 2017; 71(4):630-42. Available from: http://dx.doi.org/10.1016/j.euroro.2016.08.002
[0399] [4] National Institute for Health and Care Excellence. Prostate cancer: diagnosis and management (update). NICE.
[0400] [5]D'Amico A V., Whittington R, Bruce Malkowicz S, et al. Biochemical outcome after radical prostatectomy, external beam radiation therapy, or interstitial radiation therapy for clinically localized prostate cancer. J Am Med Assoc. 1998; 280(11):969-974. doi:10.1001/jama.280.11.969.
[0401] [6] Epstein J I, Zelefsky M J, Sjoberg D D, et al. A Contemporary Prostate Cancer Grading System: A Validated Alternative to the Gleason Score. Eur Urol. 2016; 69(3):428-435. doi:10.1016/j.eururo.2015.06.046.
[0402] [7] Sanda M G, Cadeddu J A, Kirkby E, et al. Clinically Localized Prostate Cancer: AUA/ASTRO/SUO Guideline. Part I: Risk Stratification, Shared Decision Making, and Care Options. J Urol. 2018; 199(3):683-690. doi:10.1016/j.juro.2017.11.095.
[0403] [8] Mottet N, Bellmunt J, Bolla M, et al. EAU-ESTRO-SIOG Guidelines on Prostate Cancer. Part 1: Screening, Diagnosis, and Local Treatment with Curative Intent. Eur Urol. 2017; 71(4):618-629. doi:10.1016/j.eururo.2016.08.003.
[0404] [9] National Institute for Health and Care Excellence. Prostate Cancer: Diagnosis and Treatment.; 2014.
[0405] [10] Selvadurai E D, Singhera M, Thomas K, et al. Medium-term outcomes of active surveillance for localised prostate cancer. Eur Urol. 2013; 64(6):981-987. doi:10.1016/j.eururo.2013.02.020.
[0406] [11] Cooperberg M R, Freedland S J, Pasta D J, et al. Multiinstitutional validation of the UCSF cancer of the prostate risk assessment for prediction of recurrence after radical prostatectomy. Cancer. 2006; 107(10):2384-2391. doi:10.1002/cncr.22262.
[0407] [12] Brajtbord J S, Leapman M S, Cooperberg M R. The CAPRA Score at 10 Years: Contemporary Perspectives and Analysis of Supporting Studies. Eur Urol. 2017; 71(5):705-709. doi:10.1016/j.eururo.2016.08.065.
[0408] [13] Martin R M, Donovan J L, Turner E L, Metcalfe C, Young G J, Walsh E I, et al. Effect of a low-intensity PSA-based screening intervention on prostate cancer mortality: The CAP randomized clinical trial. JAMA—Journal of the American Medical Association [Internet]. 2018 March; 319(9):883-95. Available from:
[0409] [14] Donovan J L, Hamdy F C, Lane J A, Mason M, Metcalfe C, Walsh E, et al. Patient-Reported Outcomes after Monitoring, Surgery, or Radiotherapy for Prostate Cancer. New England Journal of Medicine [Internet]. 2016 October; 375(15):1425-37. Available from: http:www.nejrn.org/doi/10.1056/NEJMoa1606221
[0410] [15] Ahmed H U, EI-Shater Bosaily A, Brown L C, Gabe R, Kaplan R, Parmar M K, et al. Diagnostic accuracy of multi-parametric MRI and TRUS biopsy in prostate cancer (PROMIS): a paired validating confirmatory study. The Lancet [Internet]. 2017 February; 389(10071):815-22. Available from: http:www.ncbi.nirn.nih.gov/pubmed/26110982
[0411] [16] Pepe P, Pennisi M. Gleason score stratification according to age at diagnosis in 1028 men. Wspolczesna Onkologia [Internet]. 2015; 19(6):471-3. Available from: https://www.ncbi.nlm.nih.gov/pmc/articles/PMC4731454/pdf/WO-19-26452.pdf
[0412] [17] Sonn G A, Fan R E, Ghanouni P, Wang N N, Brooks J D, Loening A M, et al. Prostate Magnetic Resonance Imaging Interpretation Varies Substantially Across Radiologists [Internet]. Elsevier; 2018. Available from: https://www.sciencedirect.com/science/article/pii/S2405456917302663
[0413] [18] Walz J. The “PROMIS” of Magnetic Resonance Imaging Cost Effectiveness in Prostate Cancer Diagnosis?European Urology [Internet]. 2018 January; 73(1):31-2. Available from: http://www.ncbi.nlm.nih.gov/pubmed/28965689
[0414] [19] Hessels D, Klein Gunnewiek J M, Van Oort I, Karthaus H F, Van Leenders G J, Van Balken B, et al. DD3PCA3-based molecular urine analysis for the diagnosis of prostate cancer. European Urology [Internet]. 2003 July; 44(1):8-16. Available from: http://llnkinghun.eisevier.com/retneve/pii/S030228380300201X
[0415] [20] Van Neste L, Hendriks R J, Dijkstra S, Trooskens G, Cornel E B, Jannink S A, et al. Detection of High-grade Prostate Cancer Using a Urinary Molecular Biomarker-Based Risk Score. European Urology. 2016; 70(5):740-8.
[0416] [21] McKiernan J, Donovan M J, O'Neill V, Bentink S, Noerholm M, Belzer S, et al. A novel urine exosome gene expression assay to predict high-grade prostate cancer at initial biopsy. JAMA Oncology [Internet]. 2016 July; 2(7):882-9. Available from: http://oncology.jamanetwork.com/article.aspx?doi=10.1001/jamaoncol2016.0097
[0417] [22] Jones, A. L. & Chinegwundoh, F. Update on prostate cancer in black men within the UK. Ecancermedicalscience 8, 455 (2014).
[0418] [23] Kimura, T. & Egawa, S. Epidemiology of prostate cancer in Asian countries. Int J Urol 25, 524-531 (2018).
[0419] [24] Hjelmborg, J. B., et al. The heritability of prostate cancer in the Nordic Twin Study of Cancer. Cancer Epidemiol Biomarkers Prev 23, 2303-2310 (2014).
[0420] [25] Wheeler, K. M. & Liss, M. A. The Microbiome and Prostate Cancer Risk. Curr Urol Rep 20, 66 (2019).
[0421] [26] Shrestha, E., et al. Profiling the Urinary Microbiome in Men with Positive versus Negative Biopsies for Prostate Cancer. J Urol 199, 161-171 (2018).
[0422] [27] Puhr, M., et al. Inflammation, Microbiota, and Prostate Cancer. Eur Urol Focus 2, 374-382 (2016).
[0423] [28] Liss, M. A., et al. Metabolic Biosynthesis Pathways Identified from Fecal Microbiome Associated with Prostate Cancer. Eur Urol 74, 575-582 (2018).
[0424] [29] National Institute for Health and Care Excellence. Prostate Cancer: diagnosis and management. National Institute for Health and Care Excellence, London, (2019).
[0425] [30] Blacklock, N.J. Anatomical factors in prostatitis. Br J Urol 46, 47-54 (1974).
[0426] [31] Kirby, R. S., Lowe, D., Bultitude, M. I. & Shuttleworth, K. E. Intra-prostatic urinary reflux: an aetiological factor in a bacterial prostatitis. Br J Urol 54, 729-731 (1982).
[0427] [32] Butel, R. & Ball, R. The distribution of BCG prostatitis: A clue for pathogenetic processes?Prostate 78, 1134-1139 (2018).
[0428] [33]O'Reilly, E., et al. epiCaPture: A Urine DNA Methylation Test for Early Detection of Aggressive Prostate Cancer. JCO Precis Oncol 3, 1-18 (2019).
[0429] [34] Connell, S. P., et al. A Four-Group Urine Risk Classifier for Predicting Outcome in Prostate Cancer Patients. BJU Int 124, 609-620 (2019).
[0430] [35] Connell, S. P., et al. Development of a multivariable risk model integrating urinary cell DNA methylation and cell-free RNA data for the detection of significant prostate cancer. Prostate 80, 547-558 (2020).
[0431] [36] Sha, S., Ni, L., Stefil, M., Dixon, M. & Mouraviev, V. The human gastrointestinal microbiota and prostate cancer development and treatment. Investig Clin Urol 61, S43-S50 (2020).
[0432] [37] Alanee, S., et al. A prospective study to examine the association of the urinary and fecal microbiota with prostate cancer diagnosis after transrectal biopsy of the prostate using 16sRNA gene analysis. Prostate 79, 81-87 (2019).
[0433] [38] Banerjee, S., et al. Microbiome signatures in prostate cancer. Carcinogenesis 40, 749-764 (2019).
[0434] [39] Garrett, W. S. Cancer and the microbiota. Science 348, 80-86 (2015).
[0435] [40] Chang, A. H. & Parsonnet, J. Role of bacteria in oncogenesis. Clin Microbiol Rev 23, 837-857 (2010).
[0436] [41] Hug, L. A., et al. A new view of the tree of life. Nat Microbiol 1, 16048 (2016).
[0437] [42] Sfanos, K. S. et al., The inflammatory microenvironment and microbiome in prostate cancer development, Nature Reviews Urology volume 15, pages 11-24 (2018)
[0438] [43] Nejman, D., et al. The human tumor microbiome is composed of tumor type-specific intracellular bacteria. Science 368, 973-980 (2020).
[0439] [44] Poore, G. D., et al. Microbiome analyses of blood and tissues suggest cancer diagnostic approach. Nature 579, 567-574 (2020).
[0440] [45] Zapatka, M., et al. The landscape of viral associations in human cancers. Nat Genet 52, 320-330 (2020).
[0441] [46] Yu, Z. & Morrison, M. Improved extraction of PCR-quality community DNA from digesta and fecal samples. Biotechniques 36, 808-812 (2004).
[0442] [47] Yarza, P., et al. Uniting the classification of cultured and uncultured bacteria and archaea using 16S rRNA gene sequences. Nat Rev Microbiol 12, 635-645 (2014).
[0443] [48] Gaspar, J. M. & Thomas, W. K. FlowClus: efficiently filtering and denoising pyrosequenced amplicons. BMC Bioinformatics 16, 105 (2015).
[0444] [49] Edgar, R. C. Search and clustering orders of magnitude faster than BLAST. Bioinformatics 26, 2460-2461 (2010).
[0445] [50] Cole, J. R., et al. Ribosomal Database Project: data and tools for high throughput rRNA analysis. Nucleic Acids Res 42, D633-642 (2014).
[0446] [51] Quast, C., et al. The SILVA ribosomal RNA gene database project: improved data processing and web-based tools. Nucleic Acids Res 41, D590-596 (2013).
[0447] [52] McMurdie, P. J. & Holmes, S. phyloseq: an R package for reproducible interactive analysis and graphics of microbiome census data. PLoS One 8, e61217 (2013).
[0448] [53] Ashton, P. M., et al. MinION nanopore sequencing identifies the position and structure of a bacterial antibiotic resistance island. Nat Biotechnol 33, 296-300 (2015).
[0449] [54] Bolger, A. M., Lohse, M. & Usadel, B. Trimmomatic: a flexible trimmer for Illumina sequence data. Bioinformatics 30, 2114-2120 (2014).
[0450] [55] Bankevich, A., et al. SPAdes: a new genome assembly algorithm and its applications to single-cell sequencing. J Comput Biol 19, 455-477 (2012).
[0451] [56] Simao, F. A., Waterhouse, R. M., loannidis, P., Kriventseva, E. V. & Zdobnov, E. M. BUSCO: assessing genome assembly and annotation completeness with single-copy orthologs. Bioinformatics 31, 3210-3212 (2015).
[0452] [57] Seemann, T. Prokka: rapid prokaryotic genome annotation. Bioinformatics 30, 2068-2069 (2014).
[0453] [58] Quevillon, E., et al. InterProScan: protein domains identifier. Nucleic Acids Res 33, W116-120 (2005).
[0454] [59] Katoh, K. & Standley, D. M. MAFFT multiple sequence alignment software version 7: improvements in performance and usability. Mol Biol Evol 30, 772-780 (2013).
[0455] [60] Capella-Gutierrez, S., Silla-Martinez, J. M. & Gabaldon, T. trimAl: a tool for automated alignment trimming in large-scale phylogenetic analyses. Bioinformatics 25, 1972-1973 (2009).
[0456] [61] Stamatakis, A. RAxML version 8: a tool for phylogenetic analysis and post-analysis of large phylogenies. Bioinformatics 30, 1312-1313 (2014).
[0457] [62] Lee, I., Ouk Kim, Y., Park, S. C. & Chun, J. OrthoANI: An improved algorithm and software for calculating average nucleotide identity. Int J Syst Evol Microbiol 66, 1100-1103 (2016).
[0458] [63] Gihawi, A., et al. SEPATH: benchmarking the search for pathogens in human tissue whole genome sequence data leads to template pipelines. Genome Biol 20, 208 (2019).
[0459] [64] Parker, C., Tindall, B, Garrity G M. International Code of Nomenclature of Prokaryotes, Prokaryotic Code (2008 Revision). Int J Syst Evol Microbiol 69, S1-S111 (2019).
[0460] [65] White C E, Winans S C. Cell-cell communication in the plant pathogen Agrobacterium tumefaciens. Philos Trans R Soc Lond B Biol Sci. 2007; 362:1135-48.
[0461] [66] Aragon I M, Herrera-Imbroda B, Queipo-Ortuno M I, Castillo E, Del Moral J S, Gomez-Millan J, et al. The Urinary Tract Microbiome in Health and Disease. Eur Urol Focus. 2018; 4:128-38.
[0462] [67] Eisenhofer R, Minich J J, Marotz C, Cooper A, Knight R, Weyrich L S. Contamination in Low Microbial Biomass Microbiome Studies: Issues and Recommendations. Trends Microbiol. 2019; 27:105-17.
[0463] [68] Han Y W. Fusobacterium nucleatum: a commensal-turned pathogen. Curr Opin Microbiol. 2015; 23:141-7.
[0464] [69] Song Y, Finegold, S. M. Peptostreptococcus, Finegoldia, Anaerococcus, Peptoniphilus, Veillonella, and Other Anaerobic Cocci. In: James H. Jorgensen K C C, Guido Funke, Michael A. Pfaller, Marie Louise Landry, Sandra S. Richter, David W. Warnock, editor. Manual of Clinical Microbiology, 11th Edition 2015. p. 909-19.
[0465] [70] Salter, S. J., et al. Reagent and laboratory contamination can critically impact sequence-based microbiome analyses. BMC Biol 12, 87 (2014).
[0466] [71] Caporaso, J. G., et al. QIIME allows analysis of high-throughput community sequencing data. Nature Methods 7, 335 (2010).
[0467] [72] Browne, H. P., et al. Culturing of ‘unculturable’ human microbiota reveals novel taxa and extensive sporulation. Nature 533, 543-546 (2016).
[0468] [73] Schloss, P. D. & Handelsman, J. Introducing DOTUR, a computer program for defining operational taxonomic units and estimating species richness. Appl Environ Microbiol 71, 1501-1506 (2005).
[0469] [74] Audirac-Chalifour, A., et al. Cervical Microbiome and Cytokine Profile at Various Stages of Cervical Cancer: A Pilot Study. PLoS One 11, e0153274 (2016).
[0470] [75] Flanagan, L., et al. Fusobacterium nucleatum associates with stages of colorectal neoplasia development, colorectal cancer and disease outcome. Eur J Clin Microbiol Infect Dis 33, 1381-1390 (2014).
[0471] [76] Sfanos, K. S., et al. A molecular analysis of prokaryotic and viral DNA sequences in prostate tissue from patients with prostate cancer indicates the presence of multiple and diverse microorganisms. Prostate 68, 306-320 (2008).
[0472] [77] Attard, G., et al. Phase I clinical trial of a selective inhibitor of CYP17, abiraterone acetate, confirms that castration-resistant prostate cancer commonly remains hormone driven. J Clin Oncol 26, 4563-4571 (2008).
[0473] [78] Burdelski, C., et al. Overexpression of thymidylate synthase (TYMS) is associated with aggressive tumor features and early PSA recurrence in prostate cancer. Oncotarget 6, 8377-8387 (2015).
[0474] [79] Peters, G. J., et al. Induction of thymidylate synthase as a 5-fluorouracil resistance mechanism. Biochim Biophys Acta 1587, 194-205 (2002).
[0475] [80] Spicer, J., et al. Phase I I study of oral capecitabine in patients with hormone-refractory prostate cancer. Prostate Cancer Prostatic Dis 8, 364-368 (2005).
[0476] [81] Kdadra, M., Hockner, S., Leung, H., Kremer, W. & Schiffer, E. Metabolomics Biomarkers of Prostate Cancer: A Systematic Review. Diagnostics (Basel) 9(2019).
[0477] [82] Locasale, J. W. Serine, glycine and one-carbon units: cancer metabolism in full circle. Nat Rev Cancer 13, 572-583 (2013).
[0478] [83] Lin, S., Hanson, R. E. & Cronan, J. E. Biotin synthesis begins by hijacking the fatty acid synthetic pathway. Nat Chem Biol 6, 682-688 (2010).

The application's sequence listing, which the Patent Office published only in electronic form, follows.

SEQUENCE LISTING (120 sequences)

SEQ ID NO: 1 - DNA, 20 bp, synthetic construct
  misc_feature 1..20: note = Fenollaria sp. nov. forward primer
  source 1..20: mol_type = other DNA
gcgaacaaacgtcaaggaac

SEQ ID NO: 2 - DNA, 20 bp, synthetic construct
  misc_feature 1..20: note = Fenollaria sp. nov. reverse primer
  source 1..20: mol_type = other DNA
gcctttccattgagggcttc

SEQ ID NO: 3 - DNA, 20 bp, synthetic construct
  misc_feature 1..20: note = Peptoniphilus sp. nov. forward primer
  source 1..20: mol_type = other DNA
caccgaagaccaaggcgtta

SEQ ID NO: 4 - DNA, 20 bp, synthetic construct
  misc_feature 1..20: note = Peptoniphilus sp. nov. reverse primer
  source 1..20: mol_type = other DNA
ggtgccgaccgtagaaactt

SEQ ID NO: 5 - DNA, 22 bp, synthetic construct
  misc_feature 1..22: note = Peptoniphilus harei forward primer
  source 1..22: mol_type = other DNA
gcgttgatgaagccctctctat

SEQ ID NO: 6 - DNA, 21 bp, synthetic construct
  source 1..21: mol_type = other DNA
  misc_feature 1..21: note = Peptoniphilus harei reverse primer
acctttagccttaggacggaa

SEQ ID NO: 7 - DNA, 20 bp, synthetic construct
  misc_feature 1..20: note = Varibaculum sp. nov. forward primer
  source 1..20: mol_type = other DNA
cgctcgcaaacaggttgaat

SEQ ID NO: 8 - DNA, 19 bp, synthetic construct
  misc_feature 1..19: note = Varibaculum sp. nov. reverse primer
  source 1..19: mol_type = other DNA
gggcagcattttccgaagc

SEQ ID NO: 9 - DNA, 20 bp, synthetic construct
  misc_feature 1..20: note = Porphyromonas sp. forward primer
  source 1..20: mol_type = other DNA
aagcggaggaacatgtggtt

SEQ ID NO: 10 - DNA, 20 bp, synthetic construct
  misc_feature 1..20: note = Porphyromonas sp. reverse primer
  source 1..20: mol_type = other DNA
acttaagccgacacctcacg

SEQ ID NO: 11 - DNA, 20 bp, synthetic construct
  misc_feature 1..20: note = Porphyromonas sp.nov. forward primer
  source 1..20: mol_type = other DNA
cctacgtcgcctcgtaagat

SEQ ID NO: 12 - DNA, 20 bp, synthetic construct
  misc_feature 1..20: note = Porphyromonas sp.nov. reverse primer
  source 1..20: mol_type = other DNA
tgcgtccgttcttctcttcc

SEQ ID NO: 13 - DNA, 20 bp, synthetic construct
  misc_feature 1..20: note = Porphyromonas asaccharolytica forward primer
  source 1..20: mol_type = other DNA
cgatcatacctggacgagcc

SEQ ID NO: 14 - DNA, 20 bp, synthetic construct
  misc_feature 1..20: note = Porphyromonas asaccharolytica reverse primer
  source 1..20: mol_type = other DNA
tcggctacatacgtggttgg

SEQ ID NO: 15 - DNA, 21 bp, synthetic construct
  misc_feature 1..21: note = Fusobacterium nucleatum forward primer
  source 1..21: mol_type = other DNA
tctgaatgggcagttgaagga

SEQ ID NO: 16 - DNA, 21 bp, synthetic construct
  misc_feature 1..21: note = Fusobacterium nucleatum reverse primer
  source 1..21: mol_type = other DNA
agcttcccctccttctttctt

SEQ ID NO: 17 - DNA, 20 bp, synthetic construct
  misc_feature 1..20: note = Propionimicrobium lymphophilum forward primer
  source 1..20: mol_type = other DNA
atgagcccgatgaaggttcg

SEQ ID NO: 18 - DNA, 20 bp, synthetic construct
  misc_feature 1..20: note = Propionimicrobium lymphophilum reverse primer
  source 1..20: mol_type = other DNA
ctaccgcagaggcaactacc

SEQ ID NO: 19 - DNA, 20 bp, synthetic construct
  misc_feature 1..20: note = Cutibacterium acnes forward primer
  source 1..20: mol_type = other DNA
ggatgaccttggtggggtag

SEQ ID NO: 20 - DNA, 20 bp, synthetic construct
  misc_feature 1..20: note = Cutibacterium acnes reverse primer
  source 1..20: mol_type = other DNA
cacacaaatggtggtcacgg

SEQ ID NO: 21 - DNA, 20 bp, synthetic construct
  misc_feature 1..20: note = V1F/27F primer
  source 1..20: mol_type = other DNA
agagtttgatcmtggctcag

SEQ ID NO: 22 - DNA, 17 bp, synthetic construct
  misc_feature 1..17: note = V3R/534R primer
  source 1..17: mol_type = other DNA
attaccgcggctgctgg

SEQ ID NO: 23 - DNA, 17 bp, synthetic construct
  misc_feature 1..17: note = V3F/357F primer
  source 1..17: mol_type = other DNA
cctacgggaggcagcag

SEQ ID NO: 24 - DNA, 18 bp, synthetic construct
  misc_feature 1..18: note = V5R/926R primer
  source 1..18: mol_type = other DNA
ccgtcaattcmtttragt

SEQ ID NO: 25 - DNA, 2211690 bp, Varibaculum prostatecancerukia
  source 1..2211690: mol_type = genomic DNA
atgtctagttcgcttcaggaaatctggcaagacgcgatcgaaaacttaaaacaaaatccccaggtaggccaagcagatctggcatttgtgcgcatgtctaaacccctgacaacctacgaaaataccatcgtaatcgctactccaaacgattactcaaaatcgattctagaatcccgtttaggcccgtttttacgaaaatacctgtctaaagctacctctcgggaagttattttggcggtttcggtcgatccctcgctagataatggagaaaccataaatcccaatgaacagcaagtagttgctcccgcgccaaaaactccccaaagtacctctgtagagaaaagtgtcgtttccccgcctaaaaaaccttttgattctcgccttaactctaaatacacctttgaatctttcgttatcggcggctcaaatcgtttcgcccacgccgccgcgattgcggtagccgaagctccggctaaggcctataacccgctttttgtttatggaggttcggggctaggaaaaacccatctactccatgccattggaaactatgcgctcaaactttatcctcacatcaaggtgcgttatgtaaactccgaagagttcaccaacgatttcattaactccgtatcggaaggcaacgcccacgagttccaacgccgctaccgcaatatcgatatcttgatgattgacgatattcagtttttacagggtaaagagcaaaccattgaagaatttttccataccttcaactctttacataatgacaacaagcaggtagttattacttccgatgttcctcctaaaaagctggagggattcgaggagcggctgcgttctcgatttgaatggggactgttaaccgatgttcagcctccggatttagaaactcgcatcgcaattttgcggaataaaattcgccaagagggcgtgggcgcccctccggaagtcttgtcctatattgcttcacgttttactatcaatatccgcgaactggaaggtgcgctgcttcgggttaccgctttcgcctcgcttacaaagcagcccttaaccttgcagctagcagagatggtactcaaagatattgtttctgaccccaatgatcaagaaattacccccgctttgattaaggctcagaccgccgggtattttgaaactaccgttaacgacctgtgctcaccttcgcgttcacgttcccttactgaggctcgtcagatcgccatgtatttatgtcgggaattaaccgaactatctttacctcagattggcaaagaattcggaggacgggatcacactacggtaatgcacgccaacaagaagattacccagctgatgaagtctaaaccccagatttttgatcatgtaaacgaactaaccaatcaaattcgccaagctgcgcgccatgcaaagtgatttaaacaataaaatctctccagatgtcactaaccttaaagaagattttggtatttatttaacattatttttaactactactaccagtagaactacaaaaatgtagttctcatgatcacaggttgtagcgggtttctccacacctgtgaataaacctgtgaataattggggattttttcaaaatttctgtgcatagatcactacataattcaccgttagctcattcatccccaatgcatccccagttgatccccctgaaattaacaagctctatttccgttattacctgctgttttatctaataaaatcagatattccaggaagtgatgactgtgagaagaaaaaaattagaatctaaaaaaattactaacagtaacttctcacctgaaactagaaaatctgccattaactatcagattggtgcggaactgagctcttactaggttaacctgtatctatgaccgaaaagcactccgcaggaaacgccggattaggtgatcacgattttccttcccgtaaggagcgccgccgacacgaaaaagaacaaatacaggcgcgggcacaggccaatgttacgcgttcggtggctccgataaatccggcgcgctatgaaaatatcccaaaaaagacggtatccggtaaaaaggctgcttccggtcggggaggaaatagtaatatttctccagtcccgtcctcagcaaagttaaaacccgcaggtaaaccagcgaagagtgctagaaaaaattccggtaagccggttaaaaaaagtatgcccctaaagaagaattccggggtaaagaaagatcgcaagccaagtaactcgaggccaggtagcggaaaaaattcgaaagtaaccaggccaggaaaaaatccaaagagagttggtctatgggtaaaaagaattctgggagttcttagtggactgattctagtagggattatcgccggatgtttgactttcttgattgcctactatcgtttggaagttcctgaagctcaaaaatttgctaatgcccaagtaaccacggtttattggggcgacaacgacactatgatgggtaagtttgcagaacgaaaccgtaccatcgtggatactaaatctttcaaaaattcctatatccgcgacgccgtggtagccagtgaagaccgcactttttatgaaaatagtggaattgacgttaaaggtattgcgcgtgccctgtggaataacgtgcgcgggcgacccactcaaggtgcctctaccctcacccaacaatatgtagaaaactactacaccgggaaaaatactgggtacaccgggaaatttaaagaaaccattttggcgttgaaaataaatcggcaagtgccgaaagaaaaaattattaacgattatttaaacactatctattttggtaggggaacctatgggatagaagccgcagctaacgcctactttggcaaaagcgcgaaagatatgaatctttcagaatcagcactgcttgcggggattattcctgctcccaatgcctgggatccgctagttagtcccgagcaagctaagtcgcggtggaatcgggtattgaatctgatggttgccgacaaaatgattaagcccgaagaaagaaaggccgcaactttcccgaaggtacaagaaaaaaagcaggaagctacctactttaagggaactaccgggtacttattgcagcatgtgcggcaggagttaataactgaaattggctataccgaagacgaaatagaccgcgcgggaattaaggtttacaccactattgatcctgaaaaacaaaaaatgttggaggacgcggtagcgactcttccggaagatagaccccagggactgcgagtggcagctagttcaatagataccgccaccggagcagttattgcggaatatgggggagaggattatcaaaaaattcagcggaacgcagttactcaagatattgcgcaagccggatctacttttaagccttttgccctgctagctgcgctagaacacgggcacaaattaaatgaaaccatcaatggatcgggaccaatgaaagttggtgatacctcaatcaaaaactatgggggagcctcctatggtcaagtgaacctgattcaagctacaaaaatgtccattaataccgcctatgtgagacttaatagtgaaatagggatggataccactcggcaggtggctattgccgctggatatccgaaggataccgccggtttggatcaagatgcgctagtgggcgttttaggttcaagttctccccacaatattgatattgctaatgcctacaccactttcgctactggcgggattcgccggccagcccacattgttgccaaaattaccgattcatctggaaatgtactttacgaggcagacactactggaacccgccagttcgaagaagaaaatatttccgaacttaccaaagcgctagctgccgttactgaaagtgggggaaccggatcaactgcaggcaaactgggaaggccggtagcagcgaagaccggatcctctaatgacaaccgatcagcccaatttgtgggatatgtaccgcaaatggtgaccgcggtttctatgtatcaagttggggaagatggatctgaacaatcaattacccccttcgcgggagtcagagaagttaccggcggtaccctaccagcaaaaatttggttggcttatatgaaaaatgccgttaaagacttaccggctgaacctttgttttcctataaatccaagggaaataggattagtcctagagagaaagctactccgtaccaaactgcagaagtaccttctccgccgccgccacctaccacctcgcgacccctgattgtaactagccaacctccagaaagtccctctccggaagaaagtgaacagcctgagccgtagatggagattccttaagaatctggggtaaagcagtaaaaattatttttactaccaggaccatgcgtgtggagggaatttttttagggtgaaatcccagaaaaagaggggttcataacaaagttgcggatcggctagaaatagcgcttctaactaggttatcctgtaatgcgaccttcgggtcgatagcatatgccctcctgccacggaaggaccgtggccgttagaccaaaggaggtgggttaagatgcgtaaatacgagatgatggtgatcctgaatcccgaaatcgacgaacgcacagtagccccggcgttagaaaagctactcaacgtagtttctgctaacgggggaagtgtggatgcgaccgatatttggggcaagcgtcgcctcgcatatcagattgaaaaacattctgaggggatttatgcggtcatcgatatgaccactactccgcagattgctgaagagttaactcggcagctgacgctaaacgaatcagttttgcgtaccaagttgctgcggcgcgattaagttctaggagaacaaaaatggctggagataccctgataacggttattgggaatctgactgcagatcccgaactgcgctataccgcgcaatcggtgccagtggcctcgtttaccgtggcctccactccccgaacctataaccgggcatccggacagtgggaagatggcaccgccatgttcctgcgctgttctgcttggcgggaaatggccgaaaatatcgccgaatctttaaccaaaggaatgcgggtgattgttcgcggccgcttgcagcaacgcaattgggagcgagacggacaaaaccgttcttcgctagagctgcaagtcgatgaaatcgggccatccttgcgttatgcgcaagcccaagttacccggattccgcgtgcaggggcaggcggattcaaccagggaggacagggcggattcgccggaggcgctccagctggcaatttcaatcaaggtgggggatttaaccaaggcgctgctgcaaacctgggtacaggttcgatgagtgcggcgcaaccgtccgcggatgacaatccttggactgctcctgccaccagcgataacgatggtagtaacgaaccaccgttctaaaatttcaggataagacccctagggtcacaccattaaggagttaatatggcgaagaaagttcttcgcgcgaagccgataaagaaaaaggctaacccgctacgtaatttgccggttgaaaaaatcgactataaagacaccccgttcttgcggaagtttatttccgaccgcggaaagattcgttcgcgccgggttaccggagttagcgtacagcaacagcgcgccatcgctaaagcagttaagaatgcccgcgaaatggcgttgcttccctacacaagttctggtcgctgataggagggtctagtcatggcaacagccaaaattattttgaacatggatgtaccgggactgggttcttccggtgacgtggtaaccgtagctcgcggctatgcccgcaactatctggtaccgcggaaaatggcgcacccttggactaagggagcccaaaagcagatcgacgaaatgattcgcgcacggcgccgccgggaaatctctaatgtagaggatgctcgggccgtacgggatgctatcgaagcccacgataccgtggtgatttctaagcgtgcgggtcattccggccgcctctttggagcagtatctgcccaagatgtggcggcagcggttaaagaacagatcgggcaaaccgttgatcggcgcaaggttattatcgaaaaaccgattaaagcggttggaaaatatcagattcaaatcaatttgcatgaagatattagcgccaaactgtttgtaaatgttgagggcggcaagtagcagtaagctactttcttagcagcacttagctgataaaaagtcgggcggtcttaggaaaaagaccgcccgactttttcatgtcttgataggggaggatgtcagataccttttgtaatcggcatcagcaaaggatctagtttaaaggaaaagctaagagtgctttagccaagcgtcgccgcggatgcgcagccaaagagacgcggttctgccgcccataaaaacgattccgtaggcggcccaaataccagctaatgcgagggaacgggcaggtaaaaggcgtaccaataaaatcgctggcaggtagataacaaaaactatcgccatcgctgtggccaagtatttactgtcatcagcaccaatcaggtagccgtcgtaaatgtaggtgagcgcagctaaaggttgtactagacccacaactattaagccggtggtggtaagggaaagaacctgaggatcggaagtaaatagctgcggtaaaaagggagaactaagtgcaaggaacagcccaattagagctccagacgctagtgcccaacggtttaagcgtccgattagggcgcggattcggtgcttgtcgccctcaccgagagcgttcgctagtagcgcctgggcggagattgctagggcatctagaccgaaagcccccagaacccagagactttttagaatctggtaaccggccaaagtgtctgccccgaaactagctgcctgccaagtagttaccacgatggaggcttgaagaaaaagggagcggcaaactaggggcactccgtgtagacccgaacgtaaaactagctgggggtgggggcgagccgatactccctcgacccggagtttctttactattactgcccacatccaggtggccatgaaaaactggctgatcgcggtgcctgcccccgctccggccaccccccaggagcatccaaaaattaaaaatgcagatagaggcacgttgagaagcgcccccagggtggtaaccaccaggggagtgcgcgtatctaagagtgcgcgtaaaaccccggtagcagctaatactgaaagcatcgctactagaccaggggcggaagctatcaggtagaggcgcgcaaaagtggcgaccggtggctgcggactaaaaaggcccactatttggggggaaaaaataatcaggattaccgcaaggacggctcccaggacggctcctagccacatgccttgaatacccaggcgcaacccctcaccctgtttgccagctccgactgcccgtccagtgactgcggtggtggtgtaggccaagaaaatgcagatgcctacgatcaaggttaagatcgtcgagccgatggctagacccgccagttctaaagttcccacatggccaactaaaatagaatccgccatggtcagcagaggttcggccattagcgaccccaaagcggggagcgctaaagaaagaatctgacgattcaagctctgccttgccggtttatccacgaatcctccccccatttgttatacacagccaaagaaaaactctgttagtagtttcccagtttgttacctgtttttaaacttgcggttatttattacccacaacgctcgcgtaaatttccacaggttctcaacagcttgtgcactatctaggctgggttttcaacaagttcgtttctgttttcactgtcggtttatggcaaaattaatcagttaataaacgcggacaggaagttacgatggcagattttgatcgcactcctccccaggatatagctgctgaacagtcggttttgggagcaatgatgctctctaaagatgcaatcgccgatgtgactatgactatcgggggcgaggactactaccgtccggtacatcaaaccattcatgaagttatcctggatttgtttggtcggggcgaaccagtagatgccgtcactgtcgctggacagctaaagcgtaatggtgatttagagagaatcgggggcgccccctacctgcatcaactagtttcgggagttcctaccgccgcaaatgccggattctacgctcggattgtgcgcgagcgagcgcagctgcgatccctggttcaggcgggcacccgagtggtgcagctggggtatgccgccgatggtggggatgttgatgaactaattaaccaggcgcaaagcgaaatctatgcggtcagtgaacgcggtaatgccgaggattatcgtccaattaccgaattcctggacgaaaccgttcatgaattgcaagaactgcaaaaaaatgggggtttcgcttccggggtgcccaccggtttttaccagttggataacctcgcccatggattgcaccccggtcagctgataatcgtagctgcccgccccgccatgggtaaatcaactttagcccttgacttctgtcgcaacgccgccatccataacaacatgacttcggtaatttttagcctggaaatggatggcactgaaatttctcgccgcatgatttccgcagaatccggagtttctatgtcccggatgagctcaggggatctagaggatgcagattggaccaagatcgcgcaggtactttcgcggtgttcagaggctcccctctatatagatgactccccgaatctcaccttgccggaaattcgctctaagtgccggcgcctaaaacaacaaaatgatttaaaactagtggttgtggactacctgcagttaatgagttcgggtaaacgggtagaatcccgccaacaggaagtggccgagttttcccgctcgttaaaactattggcgaaagaactagatattccagtagtggcagttgcccagctaaaccggggacctgagcagcgaactgaccggaagccaatgcttgctgacctgcgggaatctggatcattggagcaggacgcggatgtggtaatgctgttacatcgccccgaggcttacaacccggaagaccgccccggagaggccgatattatcgtggctaagcatcgtaacgggccgactgcgactatcccgctgaccttcctggggcgcctgtctaagttcggtaacccggctcgcgaatagggctcgcgagtccctgcgcagcttgcctagcgccctcctctagtgtcctggaagatgcaggcgagcgtggaaagagcgcaaccatttcggagcccaccagttagcccgtccgcagatagccataatcgcgggtacgagtcccatacgcactaaagtggcatcgagagcaaccgctaccgccagggtgaacccgatttgtttaatcgcctggatacctccggtggtgaaacctaagaatactactagcaagatcagggctgcggaagtaatggtagaagccgaatgggtgagtccgtcgcgaactgcccgtttattatcctcggtttcgtcccagatttctttaaccctggagactaggaacatttcatagtccattgacaagccaaaaccgaaacaaaacacgatcgctactacataggattccaccgcgccgagggaagtgaacccgaggagtttttccccatgaccatattggaaaacccaaaccgcaatccccagagatgacatcaaagacaccatgtttaataccagggcttgcagaggaagcaatagcgccccagtcattaagaacagcattaaataggtggttaaggcgactgcgataaacacatagggggcatactgcgccaaagtgtcttgaaaatctgtttgcagggctgcttgaccggtaacccaagtcttaaagggggcaggcaaatcccgtacctgctgcatttcctgtttcacttgcgcggcaaaggcatctttttcctgcgtgtaaacatcgacagcagcgtattgttcaccatcgattttcaggtcttccgcggggcgaattcgtttcacgtgagcaagtggttttaattgcctgtctgcccactcttgtagctgttggggggtggttttggctaccacccggatttgagggttagccgagtccggaaaacgatcccacatatcccaaagcgccccaatctcggggatggatcgcggcattgattccactgcagaagaacgcatttccagatgataaagaggaagcgacatcaccaccagaatcagagtgactactactagcaccggccaaggacggcgggttacaaaagtggaaactttacggaaaaccggggaggggtcgtcctcgctgcgggtcgtgggcttgcgtaaaatatggcgacgcacccagtttacccaggtggcaacggaggagggcgcagctagactcggtccaaaaagcatcatgagtgctggtagtagggtcatgttggaaatcatcgccaacatagttaccgctactcctcctatccccatcagacgcagtaaaggtagcgggaaaatacacagccccaaaatcgccattgacacgatcagtgcggaaaagaatacggtagctcccgcagtgtccatggttttatttaaagcctgcatatagggttcgcgggcggtctgtagctgagtgcggtaatctttgcgagagagcatccgcattccggaagcttcttcgcgacgtgacccaactagaacttggatgacacgaggataaaaaataaaggtatcttctttgccgtggattccccgtttatgcagttcagttcggtagcgagaaacgattagcagtccgtagtcaatcgataatcccagcccgaggaaagacacgatattgactacgaaagattccacagtgatcaggtaggtcagtaacaaaatcaggaacaaggtaatgccgatagcggcgcccgcgccgatcaggggcatgagggcggctaacattcctccgaaaactatcgccataatcagcagggaaatcgggatagaaattccttctccgcgcagcatatctgcttttacctgaccattagcggcatcttgcaaaccggtgttgtcgaccagatttactgtggcgtcaatagcggaaccggcaaaataatcggggagttcatttaaaaccgcggctacctggtcacgggcatcgggatccacctggtcatacccgtctgcctctagctgtacattaatcaggaaagttttatcgtccttcgcaaccatctgttttagctggctggactggatagtatcccacactgggggcaggtgggcggcaaactcttttttcacttcctgttcggcgcgctgccgtgctttttccacctgactttggctcgcgcccttagctttcgcgatttgttcagcttgcgctctgccttgcgccaacgcctgctctagggctttatcggtcgcttcctgcgcctcttttccagccggaagttgcgggtcaaaagtaataaaaggatcggcgatccccttcactttctttacctttaaaaggtcggcgtgtaaggggcgcagtattttcgctatctggtcggcatttttttctaggttgttgacttctactactgcagttactggataggtatcgccatgggcttgctcgtaaagatccttcccgattgctgagggcgaggcgggactggccggctggggggtgattaagcgttcaaataggggtttgcctcccacaccagaaaataccgctgtcatagaaattgccactgcgagcaaccaaataattacgacgaagccggggtgtttaccccaccaaaagcgcttcatccgattcatagcttcaattgtgctggtttcggcgcgctagtgcaggcaaatcagacaaagatttggaataaagacggatcataaatatttccttgaagtaagcgagctgtttttgcaggttattgtggctttaaatagttttctgcaagcagtacttggttcgcacagatattttgggaatgtaaatgctccggttctgctcggcctggaaacctaaatttacagccattcgggagagggaactacaaagtcctttcctcccagttccttaatttgcgctattaacaggtcggcgtctttagataatttctttaagcgagtagtaactttacggttaccgggatctctgtcggtagtttcccaagatttttgccgcgcttttaaagcctcctggttgcagtaaaccagcagttccgccgcctcatctaaagaataattttcttccttttcctgttttgctttagttattgccaaagctaagttgtagttaacctggcacccggccaaagccgtctggggttcagtcaatcttgcttccagtaggaacggaacttgcttagaggaacgagaaagataggtgttggcttctaccaggttgccggcctctagatagctggttcccaggttgtagttgaccagccaacgatcagcgaccagctgagaggcggtttggcgcacccgcaaaagttgcgcctgcgagatatttcctgcccggtcagcgcgcagcgcctgctgctctaaaaaccagttacgagtttgcagaccggaggccgcaatcagggaaaccaccactaaagtgacgggaataatccacaggcgagagcgtttgggtggctttattaccaggtcgtgccgggcagttaaggattgttgatgtgcagataaccggatatcaacttggtaaagcgcatcgtgaaaagaaggcacttcgcttagagaatggttggcggcagcgcctgggtgcagcagccgggaaatcagcgaggccatttgcggccagtctgtggccattagctgctggggacgatagttagcccaaccggcagtacggtaatactgtttagccaggttagctaagatttttcccaggacaacttgccgagtgtagggatctaaactgtggtagcgccgatcagcttctagggaaagaagacgttggcgataggcctttaacaggcgacacagattttcttggcggcgggtactgaaagtaaaaattggagagcgagcggcgctttggtaaaaaactattgtccagacaactagcagcactgctaccaatatcattgcggcggagcctgccagcgccatataggaatgctccattaggggctggataggtaagttagctgatgcgtttgggagcataagtcccatccccgacctcagttgtttagtggcggctgcggaccttgcggcgggttgggcggcataaaggattgctgctgaggcgcctggaattgtgaaaactgctgaccggatccgtttggtggcaccggggagacttgccccctgtaataaggctgttgcggataaccggcgggaggatattgcccctgctggtaataccccgaatacgggttcggctgcgagttgtttctaaatacttcggtgagatcagtgaccggttgccgggaaatggtctggtagattgccaagacgcaagccgccagtactaccagggaaaatacccaagttaatcctccgattatccagtaaatccaaccgactttttctaactcggaaccaaaaagacttccatacaagctagttccgtgattggcgcggttctttcccaagaagcaagctgcgtcctcagaggaaagtccaatgatgaaattggtgagcccgataactgccgtaaccgctagtaaaacaaagtaggcgggacgcggcttaataactgaacaagcagccgcccctatcaaaagcaacattcccacggcatgaataaccggcgtggtggtggcagacagtaataggaacagactgacgatcagaatggcacccgcagaggctggttcttgggctttgctcgaaaggattgatcccgtgattatccctccgatcagcatcagaaccaccaagatacaaaagattagtacggtggttagagatgatctatatctagagatcattagggtgatatcgattagtaaacaaagccaacctgcactgattaccacggttgcaatccaagcggctgctttagtgaactttcctacctgccgcagcccagaaagcataaaagccactagcagggcatgtccgatacctaggaataaccaactggtaccaatagctgcgtctgcagaaaatctggaaacagcactgattatgtaaccaactaggatgaacaataccgaaataggaataaaccaaattcgattttgcttgatgctgttcagcagccaagacaagtcagtaccttgcggaggctgaggcatgccactggggtagcccgatcccgcaggatactgtgagccagcggggtagcctgatccacccggatagcctgccgggggataggggtattgttcattgaattcgttaccggcttgcccggggtaagaatagggcggatatcctgccgggggattttctactggcggatttccaggttgataggaattatcagggaacgacatttcttctcccggtcagttgggtaaacaatccagttagctttgtagatacagaaccactgctaccaagtttagggtcagcgctagatccaagcaataattctgcaagtcgctccccaggcaacaggcataatctacaattgctaatggaaaagaaatacagggaggtatcgcgatgacgcaggcggagcggccggtgcccagcgaccatgaactggaagctctattagccgatacgcgggcgctgcttgccgaaaaagcccggtgggaagatgaccaaataaatcgggatctggatgtgcttttgcatcgggtgcggggagtaaaacggggatcttatgcgcaagcattacgcagccgcgcccaaagctggcaagcgcgctcccaaaagaacgccgggaacggggatgagcccccgggtttagttgtttccggttcgctgccggataattttgtaggcgaggacgccgctcccgatcaactggctgaacagcttgcgcgggcggaagctgaaatcagcgaagggtcaccccagtctgtagatgaaaacgaagttgcaggtgagggggtatagaagcatcttgccccagctatgaataatttggaaaataatttttactatgaagggaagcaaggatgctagtactgacccgtcgacgcggcgaagaaattgtaattggagaccaagtggtgatcacggtggtggaatcccataaagataatgtccgtatcgggattgatgcccctcgtgagctcactattcggcgcggagaacttcttgatgaagccgcccgggagcgtctaggtttacaaggacccgggccggttaataaaacggaaactcctgagcaataatttttttatctttacctacagcgggataacatcctattagctggacttagagtgcgcccccatagggcaccgagtacgctaaaaataagttatccactgttaaaacgcggataaaaatgtattggcatttgaaaagccaaaacagtaaggagtaactgtgcgaattggagttcctaaagagcccacgccagaccaaactttggtcgccgccactccggatacggtaaagaaactcatcaaactgggatatgaagtcctggtggaacagggggcgggcgaaaaagccgcctacctggatgagcagtacttgaccgccggtgcggaaatcgtggacactcaggcggcctggcaggccgatattgtaactgtcctagatacccccccaactagctatctggatctgattcgacccggagcgctactaatagcccggatggctcctgcccggcatcccgaaaccgtagatgcactggtagagcggggacttaccgggttcgcgatggacacggttccgcgaatctcgagggcacaatccatggatgtgctttcctccatgtcgaatgtgtctgggtatcgtgcggttatcgaggcggcagaaagtttcggacgtctctttaccggacaggtaactgccgccgggaaaatcccgcccgccaaggtttatgtgattggggtgggggtagctggtctagcagctatcggtaccgccaactccatgggggctcaggtcagcgccactgacgtgcgcagcgaaaccgctgagcaggctgagtcagtgggagccaccttcgttcctatcccgatcgcacaggaaaaatcggatgacggctacgccaaagaaatgagcgctgatcaagccgatgcggccaccaaactctacactgagcaggccgcttgccacgatatcgtgattaccaccgcgaatattcccggccgccgctctccgctgttaatcactaaagaggcagtagcccggatggctcccggttcggtaatcgttgatatggcagcagctggcggcgggaactgcgagctgacccgccccggtgaaaaggtggttaccgaaaatggggtgaccattattggttacaccgatttggccggacgcctacctgggcagtcatcccagctgtacggacaaaatatcgttaacctgtttaaactgatcactccggaaaaagacggaaactacgtcctcgatatggaagacgaagtagtccgggggatcacggtcgctaagggcggagaaaatatgttccccccgcctgcgatcaaggtgcacgctgctcccgccccagagaaaaccgattcggttgctgacgccgccgagaccgctcgtaaaaaggcggaagaagctgcctctaagaagcgtaaacgtctactgtgggcagcagtagggattgttttgggactggcgctgattgccgccacccccaagccgctgatcccctactactttattttgatgctggcgattgtggtggggttctatgtgattacctcagttacccactcgctgcacaccccgttaatgagtgaaacaaacgccatctccggaattattctggtaggagcgattttgcaggtaggcagcgctaaccccgtggtgtcagcgcttagcttcctggcaatcttggtggcttcgattaacatttttggcggcttctcggtgacgcaccgaatgctggccatgttccgcaaggaggagaactaagaaatgagtaatgttctatttgcggtaactcccaccctggttgccagcgcttctaagggagaattttggattagccggggacaaaacattgcctacctggtagcggcgctgctgttcattttggcactcgcaggtctatctaagaacgaaaccgccctgcgcggtaaccgttttggggcaatcggaatgtgcctggcggtagtggctaccattgcagtggcgttgcacaacgcgggcggacctggatatcaatccaccctagtaaccgcacttttgattgcggtagccatgattgcgggcgcgattatcggactgtggagagccaaaactattcctatgaccgggatgccggaactggtagccatgctgcactccttcgtaggtttagcggcagtgctggttggctataacacgtttatccatatgcccggagagtttaagaaagcgggtgtcgatgcggccactgcgattaaccccgctacggtaggtttccacctcggtgaagtcggggtagggattttcatcggtgccgttaccttgactggctctatcgtcgcctacttgaaactgtctggaaaaatcaatggcgcacccctgacgctgccgggacgcaattggctgaacgctattgccattatcgtgtccatcgtgctcatcggggtgatggttcgcggatcgcatctcagtgccaccgctatgaccttgacctggatgcaatgggtagcgattatcgccatgactgtaatcgccctggtgttggggctgcacttggtggccgccatcggtggcggcgacatgccggtagtagtttcgatgcttaactcttactcgggttgggcagcggcggcagcaggcttcatgttgggcaacgacatgctgattattgccggcgccctagtaggctcctccggtgcctacctgtcctacatcatgtgtaaagccatgaaccgttcgtttatctccgtgattttgggaggattcggttctgatgggggaccggcaaaaggcgcagataccgattacggtgactacaccgaaaccagcgcagccgaggtcgcccaagcgctaaaggactcctccagcgtgattattacccccggttacggtatggcgcaggcacaagcccagttcccagtagcggatctgactgccaagctgcgtgctgcgggagtaaatgtgcgcttcgggattcacccggtagccggacggatgcccggacatatgaacgtgctgctggcagaagccaaagtaccctatgacgtggtgctagaaatggatgagattaacgatgacttccccgacaccgacatggttttggtgatcggcgcaaatgacaccgttaatcccgatgccaccaagccgggcagcccaatcgcgggaatgccggtactggaagtgtggaaagctcgccaggtagtggtgtttaagcgttcgatgaatcccggttatgccggggtgcaaaatccgctgttctttaacgagaacaccgatatgctttttggcgacgcgaaagcctcggtagaagagatcgtgcgcaacctctaaaccgattcccaaaatcgggttccatacccaaaatttcgggggcggggtcgaaatagaacgaacctatttcgaccccgcccccgtttttaaagctgcgaatggggggtgccgtacagtcgggcagcaccccccattactccgcatctttaagaattagaatccttaggcatcaaaatattgctgccctcaagttttaacaccaggtgatcagctttaacttcagcacttttcagctgcaaacttgcgggtatgccactgatagggatatttaatgccggcaagaaatccggaagttgaatccgggcagacaatagcgacggcaactgggttttaagcgcggtcggtttaactaccaaagtgggagaaaccccatctagacccccacttagttcgatttgtccgtcagcgagaatttcttgcccccacttagtagtggagaaagtaagtttgccctggctcaaacgcactttcacctcaggcgccttttgcgctactaggcgagatagcgcctccccactcaaatccgcctgaacttttaaccgcccgatcttatcgatattaaggcgactagggctaagctgcaggttgttaagctgggcggtcacattagttaccggcagcgccccgccctcggaggcaatatcgaaacgcggagttgttactgcaacctgattgatattcccactgattattgaggtcaagaaaggtaaatcattcaccttgaccgtggcgttttcagctccccgcctctctagcgcctgagtggcttcgttttcagcccaccagcaagtaacccggtctaaaacccccagtaacaccgcgagcactgctacaactattaaaaatcgcttcagattttgcacttgttcagtatagagcgtcagcgattattactaggaaaaagcgctaaaaaggtagcagccaggcagtcttgccggtgacttcgcgagggagaaaattacttatcgatttctgcctgtagtgggcccaggagttcccgcttagggttggcgcccagaataccgcgaacgatctccccctgattgaacaccatgaacatagggatagagttaatcccgtatttggcagctaactgggggttctcgtcgatattaactttggcgactttagctttcccggcaacctcggccgcaatctcgtctactatcggacccatctgacggcaaggcccacaccagggtgcccaaaaatctaccaaaaccgggagttcagattttagtacttcctggtcaaagtctttttcggttacttctaggggttttgtcatcttatattttcctctctaaatggttaagaataattctgtcagtcggttagggaacgttcggcatcaagagcagcccggcatccggaaccggcagcggtaattgcttgacgataggtgtggtcgaccagatccccgcaggcgaacacgccgggaacattggtggcggtgccaggtaggttaacctgcacatatccggattcatccagatctacctgtcctttaactagctgggagcgtggttcgtgaccgatcgcaacgaacactccggtagcgtccaaagtagtttctttgccgtctacagttgactgcaaagtcagcgattcaactttgtcttccccattaatttgggcaacagtgctgttccaagcaaaatcgatcttggggttagcttctgcccgctcggccataatctgggaggcacgcaactggtcgcggcggtgaattatggttacctttttcgcgaacttagttaagaacagcgcttcttccatcgcggagtctcctccgcccaccactgccaagtgttggtctttgaagaaaaagccgtcacaggtggcgcaataggaaaccccccgcccagatagttctgcctcgccagcaacgtttagtttgcgatattccgaacccatcgccaaaatgacgcgacgtgcggagtattcgccctcggaggtaactacccgcttttctgccccctctaaggaaagctgcagagcgtcctcataaataagctcgcatccaaaacgctcagcttgagaaagcatgtttgccatcaaatccggaccttgaatcccctcgggaaaaccgggaaagttctctacctcagtcgtgttcatcagagcaccacctgcggttacttccccggcaatcagcagcggattaagccccgcacgggcagtatagatggcggccgtgtagccggccggtcctgaaccaataatgataatgtcacgtaccgacatagagcctcctagattttgccctttcccgcagttacttgccctattttcgcagcttaaaagaccgcgccgcaaccagttaacgcagtaagcgaaaccgggagccttaccgagctaagaaactgatatttcggaaatctttgcccgattctttccagagtcatcaaccggtaattcggggaaccataaaatcagcgcatgggcattagcctttggatccagtttgatattaaccgtactgtcaaaactactggtagctaagactttgccgtcgcgaggaagcccggattcagctagggtgcgcacctcaatcttgccgcccttagcgctggtttttagcttaattttggagatatcggcctgttccttaaaagtaaccagtaccccgaatccactacggtctccaaaaacggggttcacgaagtagcgagataaccagaaggttccttcgttaccatcgatcatccggtcagctagctcgggatgctcggtatcgttaccttcggcatcaatcgaggccaccccggcaatctccgctggtttagcagcaatagccggcttaactggctgttttatagtttgggtttgcgaaggagaaggtttcgctaccggcggggtgtggtgtggccaaaaaaccaaaactagaatcgagaccaccagcaagataaccattccggctaggctggaacgaatcaccctctgcgtggcattaaccggctctaaatcccggggagaaagctctgaaattcggcgttcccggcgctgttcacgaagttgctgtcgttggcgtcgcttagctgctttttcagcgtctctagcttctttccgcgccaatttggcctgctgtttcgcggcttttttagggtttttcgcagtggttttctttttagctaagtcctttgtcagtgctgactcaactttgggggtagccccctgctctggggtacttccagccgaaaccccagtagctagcgtcgggatatgccccgcgttatgcccctgtttacctgcacttaggcgccctaagaagtttggaggctgcgggacggctcctgcccgggcttgctctgcacttaccgcttgcggtacccaagcatccgatcctgccttttcttcctggggatcaagattcatatcctgcatttctgcaagtggaattgcttgagttctggccgcctctttgtaggggtgatcgcgatgacccggaagttttgctcccggaggcaatacccgttttatcgggcgttgggaaggcgaaacttccatagctagtcgctcagtcccagaatcctctggttccttttgttcgctcttagtgttagtttcgcctgccgtttctttagaatcagttgtagtttcagccacggaatccgaatcgtcctcatcgttatcggttttatcggcagggcgttcctcacctggaagctgttctggttctttaaggtgtccctcatcggtaccagtctgggtttcgctaaatgctgaggacatttcttcagtgccagcgtcagctttagaatccaaacctgcagtgttttcttccctaggggactcgccgcttagccactcctggactgctaataaatcggctgcccccaattgctcagcgactgcttggcaaagccgcggggagggcatcgctgctcctgcgagggcaaccgcatctaggtcaacatcctcgccttggtgaaactcagaaggtggaagtagcttgtcgccagtttttgcgcgcgcaaactggtcaggtttcccggtacataggaagtacaacagctccaataggttttgaccatcttttatttgcgtcgcctgcaagttggtaggtgcgttttgatcggcaacatccaggcgaataatcacctttcctgctggtgaaagcaaaatatggtcgggagccatagcgccataggctaaatctgcctcatgcagttgcgttaaggcttcgcttatctgagaaatcagggaatggattacttgcggcggcattcccgagccaacgatttcgctaaggggacgtgccggggttgcctgcagcaataccgcctcaaccggattgctgcagctccaaataaactcttggagaccgctagcgttaacctggcgcaagcgttgatagtagtcgcgagttttttcccgttccccctggaaaactagcagttctgcgctttgaccatcctcatcgctgaccgtccacacttctttttctggtagaaaatcacccgcgagacgttgccctaaggttaggacctggaaactttcttgaccagggaaacctaaggtcatcccgggttggagattaacgtaaccatcggagctatagctggcggttaccacctgggattcggggtgcttactggccacttgatcctcatcttccttgcttagttcacttgcaggcggcgaaagcgattccttgtctgccttagttggctgctggcttacagtctcgacgcgagcctcatcttccttgtccaccgggtagggagtgccttcctccgattttagcctgctcgctgcggcctcgtcacctgccatctgcttgtcggagctaactgctatttcttcttcgtaagccaagaggcgcggtagaggtttcccggggcgaagtttcttccatatggggaccgctaaaatcgcgagggcaggggagcgccaaaccagcagcaaactcaagtaaagcaccgtcatcaccaggctaaccacgagtacccgtgcgaaagcacccgaaatgtgggttaatgccgggtcatgatcaccaccggaaagcggaccccaatagtgcaatagcagccagccggcacacccggaaccaattccagccaatagattcgtccagagggaacgccacatttggcgggtaaagtgtaaaggcaaatgctgagtgtgcagcctccacaaggtcagtcctgccccgaatacgtatgaaagctgttcgccggctgccgctccaatcacccagtattttgccggcagtaacagcacggttaatccgcaagcaaccaaggtacatatcgtcattgggatctggactaggaaagtgctgcgagcatccgcaaaagccagcaataggcgctgcgaaagattgaaagcccctaagaaggggatgcctagagccattaccgctaaaacttgtgcgaaggtgataaccgaagcacttggggtagtaggcatgatgacctgcatgattggcaaagccaacaccacgattagcgccgaacacaaaaccgtgattaatgaaactccctgctgggtggttaggaattgcttacgtagcttagaaatttgcccgaccgccaccatggcgctcatcgaggtaaatagggcggtaactacggaggtgacaatcattgattggggaatcatatacaccgtgtaggcggtgttataggcggtggtagtggcaatagttacctgatgtttgaccgcaaaaccattagcggccgctgccacgttagacaaagctaaaaatccgagttgcgctacgcacagagccgaaaaagcccacatagcggtacgggaaacttcccccagaccataaccacgaataccccagaccagacgcattttaaagccggtgcggcgcagcggaatcagcaaaattaatgcctgaaccacaatccctaacgtagagattcctgccagcaacattatcggttccccggtccacacgctgggatcgtgagcccaatctgtttcagtgcccagtacccgccagaaaacgaaaattccggcaatgcccactacgttgttcactactggagcccacatataaggaccgaaggaacctttggcgtttaggaactgtccccacagagaataaagcccatagaaaaatatttgcggcagcgaccagtaggaaaaggtgattgccagctgtttccaaccgggatctagtttcgcggcaaataaggtaacaaataaaggcgcgagggcgacacacaccagggttagcagtaggagaccggtagtaaatagggtgagcaaccggttaatgaattcgttagaattttttcgctgcagagcccggacaatctgcggtaccagcactgccgacaggattgaggacgccagcagattataaataatgttcgggaggttattggcggcctggaaagcatcattagcccccagggagccaatcagggcaataagcagtgctgcccgcacgaagccaagcagacgggacatcatcgtgcccgccaccatgattcccgaggcgcgggctacattaatctttttgatgcccttgatttccgggtcagttttttcgtcctcgctgctcacttcctcttcctttaccctattgtcgcttcatccgggtgccacggcggaaattaataaccaggccaactaggaaaaccaccgcggtagtagcagtgaaacctaagaaaatactatcttcccatccgctgcgaatccgcaggttaatccgttgttggtcgcccaggactagattaccctgttgcggcaaaatcgccacgtaagcgcggacattgccgtttctgactgcagtaaccggaatctttacggttgtcgaccctttgggtgcaagattcaccactaccgaagactttgcgcgcagccgggaatcggtaggacgcagttgtaaacgtacgtttacctgcaggggaagcctatttatcaccttaatcggtatttgggagttggtagcgatgagatttattcgggaagaggattgaatttgcactgacctagaaactatttctagttgtttgcccgcattagtaattgcttggtttcgttctgcagcggtcatcgcacgggaagttgcaatcaatagctgctggttaatcggggtagtgattcgctcagtcgattgggtgatctgctgcaatgacgacagtagctggtttctttcctgattgagtgcttgggtgcgattccggtaggaactgccggcaaccccaagagatgatgagggtgaagaggctaaggtattagcattttgtttctcggctaactccactgaggtagactcggctgccagtgctttggctaggggcaggggatttacccacgggtcagataacacttttgctaaacgtttctggctaatagcatttgcagcggcgccattaggtaaaactgcgtttatgagtcgcggttgggcggggcgttcgctggttatggctgccagcagcgctcgcgccaattgggtgttagtgaaagcctccgcgagggaatcgtctgctagcagtcccgataaatccccataatctgctagcagggtgcggttcttctcccctaggtgcaattttgcaagcaggtcaggttgatagttatagtttctggttaacgccaagcggtcagccccggtgaaaaacacgcaacctgcggtgagctgcgtagatttatcttcacatatcgaattcgcgcgggttatccagtggggatccgctaagaagatactgctaggagccagttctagctgttttcctataagcgcgcccacctggcgattccactttgctgccctcgcaagcccgtcctcatctaactgcactaaatcaggtgccccccataaatctagcgacagactagctcccttgctttgcgcagtttttagggcggtcagcatcgccggatccaggctggcaggcgcaggtttctcgggtaaagggacaaatctgccggtgagcaggggggagtcagcttgtagcagcgccggatctactacccaggtaatcccggtagcagaaacattattgaggatttttagattttctttagcggttgacaaggctttcggctttggaagattcccggggtcaccggcagtcacattcgtacccgcaccccctgtggccagccatttcgccacttccggggaggaggccgaaatcggggcaaacaccgccaaatcagttttcgcctccgacttggatgccggtgcatacaacagtagtgatcttccgggaacagaatcggctaattttaccttatttgtgctggctaatgcctgaatccctaaagcgcccagcttgttttgacttgcggttggcaaaacagaaaccggaatttcaatctggaaagataccttgttacctgccttgatattgccgatatttttcttgcctgcaagatagaaccgtcccatcccgccaatggagtccccttggatccaatcgcggatactagcagcactggtcaccaggcgcgaacctgctaaaacctggacattaacctcacttagcgcggagtgcgaactattagtgacctgaccttgcaccgtgattttttcgttttctggggctgcatcctctttataagacagcgtgtcggggctaatagtagagattgaggtggcgatttttccttcgtcactaccttcagcggtttttgcaatcgctacctgagcgggcaaaccaggaagaagtagtaaacacgcgcaggtgattatcgacgttaaaatttttaccccaaaccgcgaggaagccacgctaatcctctatttctaatagctcgagagcagtggccaccactttgcgttcattggggtaaaccagcactttggaaaccatttccaggggcacccaagcggcggcttcggcttcatgatcgggatcattgtcaacggtaatagtgccgcccgtggcctctaacaggtagtgatgtactactttatgaatgcgtcggcctgcccccgcgaaccagtaatcaatagaaattagaggcgcaactacttttcctttaattccggtttcttcaaaaatttctctccgggcggcctgctgcgcggtttcccccttctccaaatgccccttcggcaggcaccactcaatttccccattacggttacgacgtgcaattaaagccacgaaagcctggcggttttcaacttttaataccaacccgccggcagatgtttcatcaacaattggtaaagacccggagcggcgcgaccctgcgcggcgacggcgacgatacgaattgcgaacggacatatctttaatgctaccttgcgctcatagtaggggctaacaacttgccacttggaagagtggtctagtttctggcaatctggaaacaatgaacaaaaatctgaagttagctactgatcccgctggcctgccccctacccaagtgcagttgccggaaaacgcggcggtcgctctaaagaatatgctgagcgccctagcacttttaccggcgcagattagcgagctcgctgatttatttaccgctgaaggggaagagctttccctggtaggcgggccggtacgcgatgccatgtgcggaaaaaaaccccacgattgggatctggcaacttcggcgcgcccagatacaaccgaacagattttgaaaaactgggcgggcaacgtttggaccatgggaaaagagttcggaactattggcgctcataaatctggtttaaccgtagaagtaaccacctatcgcagcgataaatatcaaaaagatagccggaaaccggcagttcagtttggggatactttagagggcgacctgactcgtcgcgattttacggtcaacgcgatggcgttgcggctgccggacttaaccttagttgacccccatcaggggattgctgatctagttgcggggcagttgcgcaccccggtctctcccgaacagtcttttgatgatgacccgctgcgaatgatgcgagccgcccgatttgcctcccaactagatttagacgtgagcatgccggtgatggcggcgatggaaaatatggcgagccgcatcgagattgtttcccccgaacgggtgcgcgccgaactggaagcgttaatggtagggaaaaatccgcgtaagggcctggaactgatggtttataccgggctggcggcaatggtgctaccggaagtggcgaatctgcgcgctactgtcgacgaacatggccgccacaaggatgtttacgaacacaccctgaccgtagttgaccaggcgattgccttggaaaccggtccagagggggaggtgccacgtcccgattttattttgcgtttcgccgcccttatgcatgacgtgggtaaacctgccactcgccgttttgaaagtaatggaacagtttctttccatcatcacgaaatcgtgggggcaaaacttacccgtaaacggatgcgcgccctccacttcgataaacaaaccattaaagacgtaaccctgctagtttccctacacctgcgcttccacggctatggagagcaggcctggagtgattcggcggtgcgtcgctacgtgtccgatgccggaaatatgctgactcgtctgcaccgcctcacccgcgccgattgcactactcggaatcggcgccgcgccgcccgcctagagcacgcctatgacgacctggaaaaacgaatcgcccagctggcagaaaaagaggaactttcccggattcgccccgaactagacggggaagaaattatgcagatcctaaagctaaaaccgggtccgcaggtcggtaaagcctataaatatatgttgaatttgcgtttagaagaaggcgaaatcggtaaagaggcagcgcgcgagcggctgcttgcttggtgggaaaaccaggccgattgatcagacccgagagattaccggtattagggagaattgttatctgcaccggggcgcatctatctgggcgaattcggtaagctaaggacatgaatgccgccgcgccctacccgggtttctttatctccttcgagggaggggactataccgggaaatctacccaggtgaaactgttaatgcaggctttagcggcacgcggggcggccgcggttgccacttttgaaccaggcggtaccggcttggggcagcgattacgccgggaagttatgcatggcgaagacctcgacccctataccgaggcgctgctttatgccgcagatcgggcttggcacgcgcagaaggtaatcaaaccgcatctgctagcgggcgaggtggtagtttctgaccgctatttagattcctccttggcctatcagggaataggacgaggcctagggttagaaaaaatcgaagaaatctctctttgggctaccggaaatctgctccctgacctgactattttgcttgatggggatccggaagtgctagtggcgcggcgtaccgacagccccgaccggatggaggccgcaggcctcgcttttcaccagtcagtgcgcaaagcgttcttgcaaatcgccgagcgcgataagcagcggatcaaagttttggatgccaccgcggatgtggaagaaatccatcagcaggttttatcactggtaagcgcggcttttgcggcgagggcgaaagtgcaggctggtcaataccgggacgggagcgggtcgcaactggcagatttaggtactaccggaaccgatacctcggacggcgatagcaggcaggctgggttgcagcagttatgagcgtttgggatcagatcgtggggcaaaaagcggcggtagcggttttcgaggccgcagcccgggccgcgcggagcctgcgggaaacgggcagtgatgatgctgctttagctcgacaaatggcgcatgcctggttgattaccggccctgccggggcaggacgttccgtagcggccctggcttttgcagcggctttgcaatgcgaagatccgcaaacacccgggtgcggacaatgccccgagtgtaagcgcgtcctcaaaggcacccatccggacgtgaaagtggtgaccaccgaacgcctaatcatcaagatcgaggaaatcgcctccctggtgactttggcgcagcaggcgcctgccgggggaaaatggcgggtgattttgatggaggacgccgatcggatggtggaacgcagctcgaatctgctgctgaaagcgatcgaagaaccacccccgcgcaccgtgtggctactttgtaccacccaacccggcgacgtgttacctactattcgttctaggtgtcgccacctcagcttagttactcccagtgtggaggaagtggcgcagttactgattgaacgggaggggatcgctcccgaaactgctcgccaggcggctgctctgtcccaatcccatattggggtggcgaaatctttagctcgcgatccggcggaactggaccgccgccgcaagatcttacttgctgccactactacctccagtgtgggtgaggccgcgatgctggcgcaacaactggtggaggcggcgaaaaccgatgctagcgaacgggcggcacaaaaggatcaagaggagctgacaaggctgcgacgctctctgggatatgaccaggaaggagcccgattaccggcagctttaaaagcccaggaaactgccttaaaagcagatcaaaaacggcgcgctactcgctatctgcgcgacagtcttgaccgggtgctactcaatcttttgggtttttatcgcgatgtttatcttttgcaatcgggcgctacggttccggtaattaacgttgatttagaggaaaccctgggcaagttggcgcaaggatcttctgctgcccgcacattggcgcgcatcgatgcgattcggacagccaggaagcgcctgggagcaaacgtgaccccgttgcttactatggaagcaatgatgatggatttgaggctctaatctatggttaaacgaaagctattcgcgctgctagcaacggtctttgcgctttgcctgacgctatctgcgtgtagtgtcggggttaaatctgaggttaaagtagatccttccgcttcctcaaaaaccaattctttagaaggggaggacgctgccattcccgcgggactggaaagctattatcagcagaaaatttcttgggcaccctgcgcggaaaatgacctcaaagattatcaatgcgggcaggtaaaagttcctttagattacaccgacactaagaaggaagatattgagttggcgctggcacgcagccgagctaccgggaaaaaattggggagcttgctgattaaccctggcggacctggtggatcgggcgttgacctgctaggaaactctgctgatatgttttctccggaggtgttttctggcttcgatgtagtgggctttgatccccggggagtttctcgctcgcatcctttggaatgcactacggatgcccaaaaggatgaatctttagccgagagcctggatcttggtactgaagctggtcgggaacgttcggttgcggatatgaaagagtttgctcagcggtgccgggaaaaaagcggggacttggcacggtatgtagatacggtttcggcggcgcgagatttagatattttgcgggcggtccttggggataagaaactttcctacctgggatattcctatggatccttcctgggaataacctatgcgcagctattcccgaagaatgtggggcgcctggtgttggatgggattttggacggatcctattcttttgggcaggtgtctttggcacaggctcaaggttttgaagaggcattcggcaactttgcttcctggtgcgcgcgggaaggaaagaactgcccttgggacactaaagaagctggtctaaagcgtttgaaagaattttttaaagccgccgatgcctccccaatccctaccaaagattctgcccgccccctaaatggtgccttagcgtttggagcggcgatcgggatgctctattacgaaactctctacccctcactgctagagggactacaagcagcgtttaagggcgacggcgcgcccctgttaaaggtttcggatttatttaatgaacgcggggctgatgggaaatttaaagataattcccaggacgctttcatagcgattaacggcgctgactatccggtgcaaggagacaaaaaagagtgggatcaacgcgggaagaagattttgcgcgacttcccgatcatgggttcttcgatggcttatggagagtatgcattggcggcgtggccgtggccagctaccgcgaaacgagaaaaagtaaagattgagggggtacagcccattttgttagtgggtaatactggggatccggcgactccctatgcgatggcgcaatccgtgcataagcaaatccctaactcccggctattgacttggaaatcctattcccataccgcctacggtttaggatctgactgcgtgcaagaaaccgtagataaatacctgttgggcgggattcttccagatagtgacgttacctgtaatgattaagggcggagattttagaggatgagcagggaaaatccaggggcgaggcacccggcagctctgcttatagccgatggcgtcgccatttttgtcgggggcatggcgggaactttggcgcgctggggtttagacacctggacgctggcgatttctaataactatttcacctggtcggcgctaactttcggggtaatcctagcgaacctggtgggggcattcttgctggggtatttcaaaacccgtgctaatcgtaaaggaacccgtctccaccgcctgggcacgcgagtaaaactgggaatcactaccgggtttttaggtgccttcactactttttcggcttttggaatcgctgctattagcgggggaaaaaccccgttgaccagtgatttttgggcattaaacggaaagttctacgtcgcggctgctttggctttaatcctgctggtagtgggagtagtcttcgcggggctggggtatcgcctagcaactagggacaccccgggagggcgtgctaaaagcgggcgcgggcaggcaagatgatgggcggaatcggttttgcgctggcgttaggggcgagcggaggagtgggcgcgctttgccgctgggggttggatgtgacctggttaaagatagaaaaacggcatcctgccgggggaatcgccttggtaaatgtgctggcctgcctgctggggggactgctagttgccgccgtactcagcggaaatctggaggctaatagtcgtgtattcacccttttagcgaccggttttctcggtggattttctactttctccactttcgttctcgatattttttcggtcaccgaacgtggaaactggcgtcgcgcctggggagcgctatttttggtgtgggcactctcgctactcgcggcggcaacaggactagctttaggagtctggcttttctaacttttaaggatgcccagcgatttttcctggctgcgatcccgggttttatgtgacatccgccggaatctcggcaggtgatttttagatttgccgagggtctgcctacaatattggagttacgcggggtgtggcgcagcttggtagcgcgcttcgttcgggacgaagaggtcgcaggttcaaatcctgtcaccccgacgagcgagaccgagagggaaagaaacgtcagtttctttcccttttgtgttgagcgaggaaggggccgtaggcgaccagccgaataccccgacgagcgagaccgagagggaaagaaacgtcagtttctttcccttttgtgttgagcgaggaaggggccgtaggcgaccagccgaataccccgacgagcgagaccgaaagggagagggcgttagtttttctcccttttagtgtgagtgaggatggggtcgtaggcgtcctagtattttgataccggctaatcatcagaatctagaacctggtattttagcctagagatacattagacgtcacctgtgatagtggcgggcagagacaatacaggacggacggtttcctatgagcgaatctttaggcgaaaccccaactaaacaggcagcggtaataccggacgatatccaggaaagcgcgaaagtaaacttcccggttttcctaggatcatcaatcggtatcttagccatcgcgctttgggcgctggtatctcccactagcgccgccgatgtgctgggggtggcggtcgcggccatctctaaatggttcggttggttctacatcgtgctagccgccatcattctagttttcgtgtttttcctggggttctctcgctacggggaaacccgcctgggaccgcctaactctcgtcccgagttttccactttcacctgggcgtcgatgctatttgccgccggtatcggcaccgatatcctatttttctcggtagccggcccggttagccaatatatgcagcctcccgtggggaaaggggagactatccaggccgccagggaagccacggtctggacacttttccactacggcatcaccggatggggaatgtatgccctaatggggatggcgttgggatatttcgcctatcgccgtaagaaaccgctctcggtacgctccgccctccacccgattttcggtgaaaaacttgacggtccgctggggcataccattgatggagccgccatcctgggtaccatctttggggtggcgaccaccctaggaatcggggtggtgcaactcaatgttggtttgcaaatcctcttcggaatcgaccaaggaatccctgcacaggtagggctggtgatcctagcggtagccatggctaccgcctcggccactaccggaatccataaaggaatccgttttctcagccaactcaacgtagtactagcattattcctggcaggctcggttttcatcaccggcagaacagattttctgctcaacgccatcgtgatgaacatcggggattttgtctggtcgttcccgcgtcgcgccctcgaaacttttgcttattctgacgtaagcgcctggatgtcggcttggacgctgttcttctgggcgtggtgggtagcttgggcatcctttgtgggaatgttcctggcgcggatttccagagggcgcaccctgcgggaattcgtagtcggaaccatgctgattcccttctcctacgtccttatgtgggtagctattttcggtaacgccgccattgacctgattcgtagcggagataaagcctttgctgatgccaccctaaaagctccggaaatgggcttttacttgctgttgcagcagtgtccggcagcggttttcattatgggtttagccactttcgtggggttgcttttttatgtaacctccgcggactcgggtgccctcatcatggcgaacctgtcctcattcttaccgacagtgcgctccgatgcccccggctggctacgaattttttgggcggcggtaaccgggctgttaactatcggaatgctggtggtagggggtatcccggcgctacaaaacgccactatcatcatgggattgccgttctcactggtgatgatcctagtgatgattggactggccagagccctaaaacaggatcggcgtgcccggcagttgcgggcccactctgcccgcaatattttggcgggaactggttctatcgccggccggttagaggctaattggcgtgaccgaatcacacgaactttcgggcaggtaacccccctagaagcccatgcctacctggataaagtggcagagccggctctgcgtgactttgccgcagaacttaacaaacaggggattcccgctgaggttgttcgctcagatgatgatcctctcgaacaaatcgacacccaaacccgtatctatgatcgtctaaaacttacggcatttaccgggcgtgaccagtttgtttatcggattttagcggtagataccgcgaatactatttttgcaggttctgcccccagtactcctcgttctacccgtctggaagtgcatctgcctgataatgatcaagattatgacgtgatgggttattctcgcagcgcgattatccatgatgccttcgatcattttgaccgctaccaggattattggcgaattaacgacgtctaaataggggcgggaaccccataaatctgcctaagtattccctattgcctagaagagttttccggtaagctgcaagtagagacaaggttttgaggcatcaattggggctttggctactgttggcgctttcggatccggcaatccgttaactacttttgacgttgactgccgtcaggattttagggaggaaaatagatgactattccggtaccgtttcacagattggcggaggctattgcctgtttcaactcggcttccttgattactttgccctacggggcgcacgtaaaagtccataccgtggatcccctattagaggacgggaggctagtaattaagaacgcgaaggattcggcactgcgtaacggagccgccaacccgaatgttactttgatttggcaaagtccctatccccatggctggagcctaatagttgacggtcaggcctgggcaaacgggcccgatttaatgatcgagtacgaaaccggaatccttactcgccccggctaccacaacgacggtccccagtgggtttggcaagatggggagcgccccgcccagtagttagctaagggcttttacgggttcaaaagaacgcagccgcaggctgtttccaactacaaacgccgaagaacaagccatcgcggctccggcaagcatcgggttaagtaaccccaaagcggccaggggaattgctgcgatgttataggcaaacgcccaaaacaggttacctttaatgatttttagggtgcgccgcgaaagtcgaatcgcatctaccgcggccagtaaatctgggcgcatcaaagtaatatcggcagcttgaatcgccacatcggttccgctgcccatcgcgattcctaaatctgcctgggcgagagctgccgcatcgttcaccccatcgccaatcatcgccacggtagcgccccgcccttgtttgcggaagactgctaccactttatctttgggttttacctccgcgattacttctgtaatccccacttgctgtccgacttgccgagccacattttctgtgtcccccgtgagcagcaccggggttatccctagctctttgaagagggtgattgcctgggggctggtttctttaacctggtcggcaatcccgataactccttccacctggccatccaaggccaccagcaccatagtttcgccgcgttcagtattttcagtaaccacttcctcgagcgcgggggaaattacggcgccctcctcgctaataaacttacggttcccggccagtactagctgcccatcaacggtgccgcgcaccccgccacccggatagctttgaaaatctggtggcacctgagtgctggcgagcacgattcctttagaggcagctgcccgggtgattgccccggcaatgggatgttcgctgccgccctccaaggtggcagccacttttagcaccccaacattatctgggggaaaaatactgaccagttccatgtttccgctggtaacggtgccggttttatcgaggatcaccgtgtctacttgccgggtagactccagaatctccgcgcccttaatcaagattcccaggctggctccccgaccggttcccaccagcagggcagtgggagtagcgagccccagggcgcaagggcaagcaataatcagtactgcaaccgcgcaggtaaaggcagtaaccggggtgccaactattaaccagataagtaaagtaagcacagatatcgcgatcactaccggtacgaaaactgcggaaatccgatcagccagacgctgaatcggagctttgccggcctgcgcctgttctactagtcgggtaatctgagccagttgcgtctgagaacccacccgggtggcgcgaactaccaggcggccataggtgttgatagtcgctccggtaaccgggtctcctacccccacctctactggcactgattccccagttagcaaggagttatctactgcgctgaccccggaaaccacgactccatcggtagcgattttttcgcccggcaaggcgataaattcttcgccctcgcccaactcttggatcggaatctgtatctcttgacctgctcgcagcgcggtaacctctttcacccccatttcagcgagggcgcgtagagcgtccccggcacgcaccttggcgcgtttctcaaaataacgtccacccaggataaaaagagttaccccggaacaaacttccaggtagatgtggccggcagcctccccggggcgcgcgagtaactgaaaatcatgggtcatgcctacccggccggcctctcctaagaaaagagcgtaaagcgaccaaataaaggcagcgagagtacctagcgaaatcagggtgtccatagtggtggtggcgcgccgcgcattcgcaaaggccgcgcgatggaaggggtaagcaccccacagcaccaccggaatcgtcagcgccagggacaaccattgccaataggggaactgtaggggcggaatcatcgccaacacaatcacgggtgccgccaaaatcgcgcaaataatcaggcgacggcgtagcgccgttagttcctccgcgctggtcctcgggttttcttgcccgtcctcgtttcctaaatcttcccccgtaaacgcgctataacccgctttttccacggtttttataaaatcttttacgccaaaatcaccgctttgggaaatcgtggctttctcagtcgcatagttaacggcggcactgactcccggcattttgttgagggctttttcgatatgtgccgcacacgccgcgcagctcatccccccgattcttagttccaagttatcggtattctcgctgctactttccactgcttacctcctgcgccctatcctaactggttcttagatgcctgcgaagagacttttccccagggtgaaaaaccatatgatttcgcaaataataattgcttgagccagaaaaatctggtgaagaggcggaaaaatacttgaaacagaaaagtaggtagcggagccgctaatcggacttgaaccgatgacctacgctttacgagagcgttgctctaccaactgagctatagcggcaaatgcctaaggcaccgtgtcagtctatctagcctgacacgtgctttccaaacttttcgaccaggtagagcggttattttcgccacgctcgaggggccggcagggcggggaaccagaaataaaaatgttagagctggcgaatagtttgttttatcatcgcaatcatgccggcgcgcactgaaagcgaatctactcccgcctgtaccagtttgcctgcccacgccgggtcagaagccatatctccacacacgcacacctcaatcggcttctcagcgccatgcgctatccgtactacctcgcgaatcatctctaccacggtttcccgcacctcatcggccagctctgctacctgcgaatttccacgatcggcggccgcaacatattggcaaagatcattagtgcccaccgttacaaagtccactgccgagacgaactctgccatccggagggcggcagaaggggtttccaacattatccccagttgtagagggatttcggttgggcgggcgtcccattcaataccgaaagtatcgacggtgatttcctctaacagggagcgtacccagtccacttgccgcacatgattaaccataggaatcatcactcgcaggggtttacccagcccggcggcctctaaggtttggttggcgtcaataaccgcccccaactgttcgcgaaccaagtgcggaaacttgcgaagtaaacgtaccccgcgcacccccagggacgggttcggttccggtggttgcttcgcgaatggtagcggcttatctgccccgatatcccaaagccgaatagtggtttgccctagtttgcgggcaagcccggtgtacactttcgcttgttgctttcgggaaggcgccacctggtaaccggcaaataaggtttcggtgcgtaacaggccgcacccttcggcacctttaactgtcccgggagcgatcgacacgttaaccaataccggaacctgtctgcctgcagaagtaactgcgggctcctccagcaaatctaaggctttgctggcgatggcgacccgctcgcgagctagctccatccagtgggcaaacaccctggccttggggttaacttccaaatgtttagtgcgcgggtcaaaaataatggtgtccccatcgtgaactccccatttcagaccggcatacactggaatccctcgcgaggccgccactatagcaccgtgaccggtagcgcccccgctgcgggtaactaccccctcaatctccggaggcaaactggccgccaagggtgcatctagttcgtcaaccaccagcaccgccggggtggaatgtctcttaatcaactcatcgagattatcaagttcctgcccgattaacgctttcttcagtagccgcgatactgcattgaagtcggcagcccgctgcgctaggtagggatcatcgagtttacgcatcctattagctgccgccccgtaggctttatctaccgcaacgaaggcgttggcgccgcccgcgatatcctcggcaatctctgcccgcaattcggggtcatctaccagtccaatctgcatttttataatcgaatctgatcccagggaagatagataggctttaaccgccttccgcgcattttttaccgcctcgccctcattggggctcacttgataaaactcggcgtcatcttgcccgcctagtagcatcgcgtatccgatagcaatctggtcaccgttgcgagcgggattccgcggggcagaagctttcgtagacagtcgcagagaaataccgttaactgcattttctttcttcccccaggaggggtcggcaatcgcgggcgggtcgagtgctaatagcccctgacgaataacggcaaaaatctgctgggcatgtggatctgtggtgcacagttccaggttttcgccctcgccgacccctagggcacttacctgggtgagtgaggcggcgttaactgtgcggaaagctccacctttgcgcgcataaactgcgcctttatccccaatggcttcggcgatggcggcagcggggcgggcatgcattccgtggggatcaataatttttaggacgaggatggcggcatccgggtcggaaaaaggatttatccccgaaccggcaggggcagaaaatggtatagatcctgcctcgccctccaagctggattcctcctgggcgctaagctggtcaattttttccgctaaagctgccctagcttgggcggcaacctccctaaggctggcgcccccagctgcgctcaccagggctgccaccagtccttccaccagcggggcagaggagattaggcagcgttcagcgaggtcaggatctaccagctctaatgccatctgcgaactgagtaacgcagaacctagatcaaccaaaatcagcacaccctcggggttgtcggctgcttcaatagctgcgctgatttgctgggtatcagttcccagatccagtttgtcgccgtcgcggataccggctgccaccagtactttaggggtagttttggtgctgaccatctgcatcgccaactctttggcggcagtagctagcgcaaaagaatgagacaccaaaaccaaggaaatcatgcctactccttataaccgggtcgatcccaactaccgcatgtatgtcctcattgtgtcacgtaccactttttgacgctagcgttttttccggctgtgcggggcggatgcgcgctctctttgctttttttgtttcgctttaagcgccgttagctcggctgacatttcatcaatatttgcacgcaccaactcacccatcttgacggctccggtcatattggggtgggtctgatcgacatgtaaccattcgggatgttgggaaactgcttgattccagtcaatcagttttacattggcatattggttagcgatatcggctagtatctgatttgattccgggacaaaggtggaaggagaatacaggtttaccagcagaatcatccggtcaggtcccagttgcttgattgcttgatgtaccagctctgcgtcgtagactcccgcattagtaccgtaactgatcaccacagtccgccggatttctccggccgctagtccctccgagatgatttcagaggcgattccccactgtcggttaggtttggctaaaaagttgattccaggcatagccttatcgaagcccccactggcggcagagataatggaatctccaatggcggtgatctcttccccactggggttagaagtatccaagttctttgataacacgagacggtcatcttccggggtcggctccggttcgggggtggtgggtttaggagtcggggttttcttcgtttcttctttatcctgtttctgcgcttgttcaatggcgagttgggtttgtgattttgagggcgctttcgcaatcgccaaaccagtaaccccggtcagcgctaaagcaagcagaaccgctactacctggatgaggcgctgccaaatgggtgcttgcggacgggaaaatgctttccggaaaccgcgtttgcgcactggagtttctaagaaacgataggaaagttcgcatatcagcacggttattagtacacacaggacagatctgacccagtagagcgcagattctacggcagtggggtacagggcgccggcgattatcagaatcggccaatgccacaggtaaagaccataagaacgagtacctatatatttaagaagccgcagttcccccaggcgtgctaacagactgcctggcttgaggatgcaccaaatcaggagcgctaccactaggctgcagccagcaattccctccctaaaggtatagggggaggcatctgttaataggagcatggcggcgatgagggctgctaggcagataaacccgaggagctgtaccaaaaacttccggaatttaccgctggatttggcagctgaatccggattttgtaccaagtctctgctgctccaaaggaacgcaacgcaaattcctagagctaggccaaataggtgggtgtcagttccataatagacgcgggtggtgttatccggatcgaataggtatcccatgaggaaagcgctggttcctgccatggctaccgggattagcatccgcatccagcgtcgcttaaacagggtgacacaagctagaaagattagcggccaaaataggtagaactgttcttcgattgccagtgaccaaaaattcttgaaaagaatcggggtggtggcggcgaaataggaactgccgtgagcgatttccagccagttggtggaaaaagttaatgctcccagtacctggcgccctatccccactagtaggtctcggttaactaaaaaggcggcggggacaaccgtgattattagtactaatagggcaggcaggaggcggcgggcacggcgcaaccagaaatgccccagggaaactttcccggtttttgacagttcccgcagtagcagcgtggttatcaggaaaccggagagtacgaagaaaatatcgacccctaagaatccgccgggaaaaccgctggggtggaggtgataggtgatgactgaaattaccgcgagggcgcgcaagccatctagtccggggatgtagtgagatttaggtttggcaggggggtgcttaactgcaggctggtgagcagggggaatgtgagtagctgcaggtttgccggcaggcaatggaggatggtgaaccgagggcgtgttgacggggtgcttagcagcaggctggtgaacagggggaatatgggaagctagcggtttgcgcgcaggcaatggaggatggtgaacagggggaatatgggcagcgggaggtttgccggcaggaaatttggcaaccgggatagcagtgctccgatgattcttgttaaatacgggattagtttctggtgattccacaggacgccctctatcttctgtctgattaggctgtctagttttttccttgtgccggttgcctctaaatagcaatagtgctgctggtgaaataattatcgagagcgcaatagcgactttagcaattctgttcttgcggttagttctgtgcttaatcaaaataaacaactaccctaggctcgtacttatttcccatgctcactgcagctaatctagcactattgaactttccagctatcaagggggttaatagctgatttatcagacaagagcgagccattggtttttgaagattaatgcacactgtttagggctacctaggttttcgtttgctggttatatctttggtcgcaaaattcgtcatgactctccctgttctcccagttaaaatgagatttgaagaaatttttatttgtgaggatgctccggggcttttaggggagccagcagcgcgaatcctgtccccagcagcaaagtgattcccagaactccgaaatgttgagagctagctcctgccggcacgaaaagtttcccaatccacacgaacagggcaaataaggtgggggacatgaaagaaactgcgcgtccggtggtggcgtaaagcccgaaaagttcgccctcgcgtcccttgggaataatccgggcaaggaaggagcgggaggccgactggaccgggccgacgaaaatgcaaagtaagagcccaaaggaccagaagatcttagcgccgccattatgggcgaagaagaggattaatcccagggtggtcatacaccctagggaaaagatcattacttttttcgggccgaagaagtcatcggctgccccacaagctatggtggcaattcccgccaccacgttagcgacaattgcgaaaatcattacctgtccgccatttaatccgaacacagtagaggccaggatggctccataggtaaacaccccggcgaggccatcccggaaaatcgcggaggcaatcaggaaacgtaaaatctcgggtgcggttttagctagccgtttaatggtttcccacagctcgatataggcggctttaactcccgctagtcccccgaccggttcttgatcttgactgtctacccccgccatggtcaccggatggagtttcccatccgcgccccgccggcgccccggcagagccacaatcactgggatcgaaaatactgcgaaccaaatggtcgcaaacaccatggcaatccgaatattcaggaagttctcaccggtaaccccgaaccaacccacctcgggcgagatgaaaccgatatagagcaccccgagcaaaataatgccacccaaataccccataccccagccgataccggagactttccccatgtttgctttagtggaaacccgtgccaacatggcgttatagttcactgacgcgaactcgaagaagatatttccaaaagatagtagtgctacccccagccagagcgctccggtttttcctaagggggaagtggggtagaccgcgaacattagtgccatacagatggtgaccagggcagaaaacagtgccaacatccgggtgccgcgacctttatggtcggcgcgctgcccggaaactggcgctaccagggcaatcaccagccccgcaaaggctagaccaatcgataaatcagtggtggcctggttgccgggggcaaataaatctttggtggtcaggtagacagtgaaaacgaaagtcgtggccacggcgttgaaggcagccgaaccccaatcccaaagcgaccaggctaaaattttgcccttagtacgatcgtggtcttctgctggtagatgttgctggttatcaccggtgtcagccataattttactgcctcattctcgatttggattctgcgctaaccaagtggctagctgcaaatccaagggataagtgattttcaatgcttgcctagacccggccacgaagtattgttggtagcccagacgcgccaccaacatggcatcatctagggctccgtccccggcttggtcttcttcgtgtccttgctggtgggccgcaaaaataacgtttcccgcaaatccttgcggggtttgcacgcagcgtaggtgggcgcggtcgggggtggcaccggccggggtaatctcgacctcttggcgggtaaaactctcacccgcgacctcccgcacagtatcaactaactcggtggcaggaactaccgcagggcatcccgatgcgactgcggcacaaactcgctggaactgctgtaagggggtgagggcgcgcgcggcatcatgaatcaaaacaatagcttccgggtcatctgcggttacctgcccggcacccctatcaaaacttagtaatccttgtagaccctggtagacagagttttggcgagtggtgccgccagcgataactttccacgggtaggacagagcagcaccttgggcaacctgggcaaaagtttctaggtaatcctggggagcagtaatcaccactcccgccaaaccttgtagaggttcgagggcgcgcagggcatggtgcaatagcgggctgcccgccaatttcaccagcgctttcggttcgggattacctaggcgagttccagaaccggcagccgttacgacgcagtagatgctgcgtcccataaccagtcctttagcccttacttattgttgacccggtcgtattctacctgggcttcttccatgattttgtcgaggcgatcggaggcggcttcttcgtcctcttccttagctagagccagttcggagatcaggattgctcgcgctttagccaacatccgtttttcacccgcagacagcccgcgttcattgtcacggaaagttaaatctcgaactacttctgagactttcaaaatgtctccggtagcaatcttttcgccgttggccttgtagcgacgcgaccagttcgagggctcttcgatatgaggttcttgcagtacggcaagaacttctttgagtccttcctcgtccaccacatcgcgaaccccaaccatatccacatttgctgccggcacctggatggtcatatctccattagtaacccgcagcatcaggtaggtggtgtcttcacctttgagtttgcgggtagtgatattttcgatcaccgcggcaccgtgatgggggtaaacaacggtctggccgatttcaaatgtcataagttacaggctcccaaatacaaattttccggataccattctaccgcaaatcggctttacctgctaaagaggctcatttttcgcgtcgggcaggagaaaattgcttgtgcctgagatcttgtgtggggttattgccagcttggtttttggcttttcccggcttttctctactaatgttcccggtagatttctccagctatttattcgcggaaagctcggaaatagtgatgatagcggcctcaggggggcaggccagacgcaccggcgtgaacttggaggttcctaagcctcgggaaatatgcactgtggtttgccccgctgcgaccgggtctgaaatccccgcctgattcctgagcgcctgcaggtcaactgggggataggttttccctcgtcgcatccgaggcgccggatttggcacggtgcctattcgccaggaacggactcctcccgaataggaaaggggtaaatcggtgttgttcactaaagccccgaagcctggcaggcaaacctgacctccgtgggtatgtcccgccagcaccaggtcggctccgcaagccgcatattggtcgaggacgcgcgcgtagggggcatgggtgagggcgagacgtaaatcagctttactccaggtatccggtgtccgtatcgcttcgtcacgcccgatatggggatcatcggtccctgaaagcgccacggttaaatcctgtgttgctcgcccctgtcgcgcgggagaagtcaccgccaaggaggccacttgattattaagatcctgccagcctcccgaggttaagaaattctggaattctgcagttggcaggtcgggaacgttgcgtaactttggttttttctcggggaaaaaatagtgcaacggcactttgaactgtcccgagtagtagtcattggaaccaaacacaaaggctcccggaaactttagtaagggagtgagggcgcgctgcagcatttttaatcccgaagaatcacaaaagttatccccggtcaaagccacaaaatcaatctcggtgaactcggctagggaagccacatattcagctagccactcacttcgcgaccaaaaatgcaggtcggacaggtgtaatattcgcagttgccaggcagttcgtacctgctgtttagctatcgcagcggcagattcctggccaataggtgactgctgcgactcacagcgtcggtcacctagatccggtaggtttcctcctacacccaaagtctcttgtgcttttaatccaggaatcccgggggatttcagtagctgataacggcgcaattgcgggcggcgtgcctccaaaaaaggatagaccgccgcagataaagccaatgctcctagggcgctgcgcttcctcaaacctaattttccccttcgtagaaggtttccgtgatttcggtgacgccagggctgggggattgtgctccctcctggggttccttcttctgcgggcgccgcggtccttggttaatattcttgcctcccccgagattgacctgggggaagctggcagcaggtagcggttgtaccgctttcgccatatattccttaaaggtcatggccggaacggtattgccgtaaagcaccccgtagtaactgccgttaattctcatgcctaccaaatggcggtttccgccctgcgaataacccacccacaccgcggtagccagattgggggttgctcctactgtccaggcggctttggggccgtcagtagttcccgttttagccattacttgtcggccaatacttacccgacctccatagctattggcggtagaaactagcacctgagcggtcttattagccacttcttcatcgatagtacgtttacatttcccggaaggaacttttaagttcttaccctcagaattggtgaccttttcgagagcaatcggagtacaacggtttcctccggaagcaatagtgccgaaggcgttagccatattcaaaggcggaattgaagcggcaccaataatgaaggaaggtccgaaatcttcttttccattgggatctccggtaaccgcccccattctctgacccatcttgtaaatatcgcaaagattcaggttaacggccattcccgcgtaggtggtgtttaaagatttctcggtaccttcaactacggaagtggcgtagttatttcccccggtagcattctttaaatcccagggcccggcctttaccgggcagttcccggaaattttccattcactggcgttgtagtgggtgcgtcctcccactaccgaataggccgaatagccgttatcaaaccaggtggccaaggttactggtttataggatgaccccggctggaagcctgcgcccccgccatgggctttatccaccccaaaagaggtttcagttgcccgcggatgctcctcgtctggattcccataaggggtgttttgtgctaaggcacggactttacccgtaccaggctcgatggaagcaatagccaccgacaagccggaggaatcattctcaggaatccggttaaaggcggtatcggtagctgcctcctgcatatcggagtccattgtggtgtaaatcttgaggcctccgcgtagcaacagccgggcgcgatcattaaccgactttccaaaagccggattgttgtaaatttcattgaccgcaaaagcacagaaataggaagcctttccagcagccgcacatccttgacggaactgagaaactttcagcatatctgcgatttttactgccttagcttcctcatattgcttataggtaatcatccgttcccgcaacatagcctttagtacctggtcacgccgattcttaccggcttcgggatgtaccgtggggtcatattttgccggggactgggtcattccggccagcagcgcgccctcgccaatcgttaggtctttcgcgcccttagaaaaatagtaacggctggcagattccaccccataaaccgaagccccatagggagcgatatttaagtacccctctaagatctggtctttggaaagtttcttttcgatagcaagggcatctttggcttcccgcattttccgggcaatgctctgctcgcgagctttgcgaacctcattcatatcccccgagcgcaaccccttatcaatcaaggtgtttttaactagctgctgggtgagggtcgaggcgccttgggtatcgcgaccagccaagttattgacaatggcgcgtgccatcccttccagatctaccccccggtgttcatagaagcggtgatcttcgatggcaatggtccccttttgtacccagggggacatatctttaagtttgactacgatccggttctccgcgtaaaaacgggcgatttctttgccgtcgtgggaataaagaacggattgttgggaaggctgggtgggtttaaactcgctgggaatctcggtcattgcgctcatccctacccgcgctgttagcccggccatgcccaccacaggtagggacagcccggccagcagtactgctgccagtgcgattagagccgccatcgccgtcagggtgcggcgtagctgctggcgcggcagataacgatcggtgcctttatgcatattcctaccctactttgcctgacctcatttcggcaccttcgggggctgttggtaagcagattgtgggcaatcacctcctggcggcctagctaaaatttcttttggttttcattttgtatttttagcaaaatgtaggtacggtcacatatgtgggcaatgtcgccgcaagagttcaaggagtgaacaatgagttttagccaggacgagacgtgggctgcgcgggctctgtgtgctagccaagaaccagatgcgctgtttgtgcagggtgcggcgcaaagacaagtgcgcacccgctgttttgcctgcccggtacgtctagaatgcctggctgatgctctgcaatcggaagccaactatggggtgtggggcggtcttactgagcgggaacgccgggcgatgctgcgctattacgatgaggtcaccgactggtgggagtggctacataattcttctgatgaacttgctgccgagcttcgccaacccaccaccccgaacgttttggcgcgggtgcgttaggtaccgcgctgccgctagactgaagccatgactaaatgggaatatgcgacgattccgttactgtcgcacaatacgaaagcaattcttgataattggggcgaggacggctgggaactggtcagcgtaatcgccggcccgaacggttgggaaaacccggttgcctatttgaagcgtccgcgtggtgaataaggttaatcatatgtcgcaggtttctgaccgcttgattgaagcgggattatctttacctccggtagcaacaccggtagccgcttatactcccgcgattgctatcaagagcgagggcggattagtggtgcgcacctccgggcagattccggtagtggacgggaatctagtagcaactggtctagtaggggcggaagttagcccccaagacgcctatcaggctgcccaggtatgtgccctcaatgccctggccgccgcggccgaggtagcgggcgggctagatcagctagagcgggtattaaaagttaccgtgttcgtagcttctacccccacttttaccggccaggcggcggtagcaaacggagcttcggatactttcgggaaactatttgaccagccccatatccgctcggcagtgggggtagcttcgctgccgctaggagccccttgtgaggtagaggtagagttcctggctcgcgcgtaaaacctgcggttacctggttagttagttttctgagcgctgacagtggcggcgcgtcgcgccgaccagtagacgatgccggtaaagatcgcggtcccaagggtgcaaataagttgcacggacagtgcatgttcggcggtgagggcagcgatggcgaatccgttcaacacgcaaagcaccgcggtagcccccagcaggggagcggccgcccggtgcgcctggagccaagtgttatcgctggtagtggtggcggcattgacgatcccccagcgagagccgcggggcagatgttggcgatgaaataaaatcagtcccgctcccaggtaggctgccagcagcaggtagcagatgccaatcaccaaagccatcatttattcattccctttctccggcggattcagttcaaactttaacggattttctcggcgcttcagggcgtcagctagggcaaagaggaaagcgatgatgatgaaggcgattactgcggacattccgtagctaaaggcgccggtataggcttgccttgctggctcgctcccgggatgagcgtctacggtgccgaggcgcaggtaaaaagccaaagtggcgccggccagtccaatcgctcctcctactcgctgcgcggtttgagaaattcctccggcagctccggcgttaccgggcggtattgaaagtagcgagaatgcttgggcgggagaaaagaaaattcccgaccctaaacccgaacagaacatagaggctattagcaggtagggaatacttttgggggaggcaagatgggttattagtaccgtgccagtcaaagaaacaatcactagggcgcaagcgattactaaaatccagcgcccccactttatggccaggcgcgaagattgggcggaggaaatcgccgaacccagcgctaaaggaatctgtaaaagcccagctaccaggggacttattcctaagccttgctgcagatagagggtgtaaataataaatagtgccgtccagcccgcacagaaagcggttagtaaaatcgtgcccaccatataggagggatctaggcgcagagaacggggcattactaccggaatcttgcggttttcccggaagttttccagcgcccaaaatcccagaaaacccagggctccgcctggcagtaacagccagcgccagtttccaagtcccccactatgcatagtggcatcgataaagggatacatcaccgctaaaaacgcggccgccagcaggaagattccgggtagatctaagcgggtgtcgctggcggtgcgggcagggtcaggggcaatagtgcggtaggtgacgaaaataattaccgcgcagatgggaatattgattaagaatgcggctcgccagccaagattggtgcccagcagggcgattagtaccccgcccatagtggggccgatggcggtggcaatcccgataatcattccgaaagatccgtaggcgcgggcgcgttcttgtccgcggaaaagtatttggatcagcccgaatacctggggactgatgatggcggcgccgacgcctgcgagcaggcgcatcaggattaaagttagggggttcatcgcaagcccggcccctaatgaggaaaccgcaaacactgctaccccgattacaaacaggcgacgatgcccccaggtgtcgcccattctgccggcaggaatcagcgctaagccaaaaaacagggtgtaaccagccataatccattgcacatcgttgctggttagccccagcgccttggtcatggaagggatagaaacattgagcattgacactgccagtaaggtcagggccgccgctgaaagcaaagtataaagcgcgcggtaacgttgacgctggtctggctgtggattgctcatcggttatagcctaaggggtggcggggcgaaagcgttagtacattcagggtgcagtcaacccaaccccagttaggaactttgggaggtcggtttgggaagaaaaatttctgcggaggacgggcaggcagctttagccgcttggattaggggaaatgctagccgggcagatcaaggcatggcagtgcgttacagcttgcagattttagcccagcgtcatcccggtcaggcagttgaggtgcgggtgccaccttttggggcagtccaaatcggcaccggaactgtgcatcggcggggaacccctccggcggtagtagagatgaaaaccgatacttggcttgctttagctagtggcagtttgacctgggaaaatgcggtgagtggcaaacagattaacgctaccggggtgggttcagatttaactgcttatttgccggtattttctccgttgccaccgctttcctaggtttagttagctttcgaaagaggttatcgcgccgcgattcgccaatgggggaaactaggcctccgcatagaaactacccgtagcatagaatatggttactaaaaggaacagctctcagcaatggataggagcgatttgaaaatgtcagatccgcagcaacccgtaccttcaacaccgggttatcatcccgcaccgggaactccgcctgctcaccggccagctccgggcgtaccggcgactcccggttaccactcgaataataaaaccgcaggcgagggggcgacttgggtatctgtgagccagccaggggaagatactgctaaatcggatgccgctaaggcaccctccggtgcgtcctctggttcggaccgtgcggttccctcctatactccccccacctcaaatactgagaagggcacggaaagtaagaacgctgcccccgtgcagacaaaagctacctcgacccgcccgagcttggggaatctggtatcaaagctttctgaccaggtacaagccttagttaagggcgagattgaactagcgaaagtcaaggccgccaatatggcgaagcgttccggggcgggaatcgcgctgctagtagtagctggggtgcttgctctctatatgctgggattcctgtttggagctgccgctgatgccttcgccctagtggtgccgatgtgggcagcgaaactgattgttgccggcatacttttggtgctattggcgattttcgcactggtgggcaaggcttcgctgaaaaagggattgtctgataaaccagatccccaagcgggaataaaagaagatattgaggcggtaaagaaaggcttggaataagatggaacaacgcagcgaaagtcagattaaggcggatctcgaggccgcgcgggcagacctgagcggcactgttgaggaactttccgactatttttcgccgaaagccaatgttcagcgggcgaaagcggatgcccagcaaaaggtacgttccttagcagataaggctcaagacacggtcgagcaagccagtgagggtaagccggaggcaattaagaaggtagcagcggtggccgggggtgcactcttgctgggggcactgctagtgcgccggatgttaaagtaatcctaaagcaaagctatgtgaagcggatgatttttcccgtgacttcgtgtgccgtggaactcaaccgtggatttgaatggtcataacgcccgcaatgcggtatctttttatacagaacatttaaggaaagttttagggtgcgcccggcgtgcccgtgattatagtggagggggtcacgccatggggcgcggccgtcaaaaggctaaacagacaaaagtagcgcgcaagctaaagtattacagtcccgagacggactatgaggcactgcagcgagagttgcaggctaaacagcgcgatgaagccgccgatgacagcggtgatgatttggaagattggcgcgactatattccgtccgctaccgacgacgactggtttaagtagctgccggcttggacgctgctgctagcaaattcagggttggtggcaccgcagacttctaaaccgtcagcgtcagaatccgacaaatatcctaatgacaaagaatagcgggctatcgctgatatccggatataagcactgattagtggactaatcctcagaagagatcgcctctaggattggcatcctgcgggcgcggcgtgccggcagtagcgctgccaaagttcctaccagcaccgctaacagacaaatccaacctagcgaagcccagggcacctcaataatgctgattccctgatccgcaaggtagcgacacacaaacacggctagcgatactccgccgcctatccctaaaagcgtacccgccagggtaatcagcaccgcctccaccgtgatcatcagagacagccccagggaagaaagccccacggtgcggattagccccagttctctaaagcgttgctgcaccgacaacgagagggtattcatgattcctaaagccgcgattatcagggataacgctagcagagcgtagaggacggccaggacttgatctacggtagcagccactttatccgccgcttgtttttgggtttgcaccaccataaaggggttatcggcaatcgcctttttcacttgacgctgcactttattcaggtcagccccagtttcaagcttaatgccggcactggcagtaatatcggctgcttccgggcctagctgggtggcgagggcgcgcggtatcactacatccaagaacaggaatccggtgtcgatagtggctgcgacggtaactgtttcttgcccccgcagcccgttcatctgaaaagtatctccgggagcgagcccttgagatttcgcccaagagcgggaaaccagcgcgcggggagcctggggtgactgcgagaaatagtccttagccgacccgataaccgcactcacctttccatagcgattgaactggggataggtcacttgggtcatggtttcctgcggattttttccgggaaccgtaactctaaacagtcccattccggccagggggtcaacccggctcaccccggaaaccttagcgactttatctaaaaggctggggggaatggaaactactttcggatccggggaaatcattaaatctacgtttatctgctgcgctaccgccgattgggtagaggctttggtcgaggccgccagggtcgctcccactgctaccagggcaaccccgatcatcagggctgcggcagtgttagcggtttgtcgcacgttggcagtcagggtgcgcatcgccaggcgggcatgagggcgcagccaccaaataagtcccgctaaggctctcacgactatcgccgctaagggagtaactaaaatcagcatggccaacaagaatagtgcggcgccaatccctagtcccaggccgctttgcccaccattagcagaggcccagatcaaaagtcccaccgcgactgcgagtactactgctccgataatcgcgcgcggccataccggcttttgggtttgcgtattttgccgcattgcctcgaccggaggcgtaagtgccgccgcgcgggcaggccaaagggaaccgatgatcgtcaccaaaatgcccacggttaaagccaggagggtaatggaccatgaccagccgattcttagcgcgtcgaagccggattttgccaaaccccaagaaaccgcgcgggtgagcagatatccggctcctaccccgattacggaacctatgatgcctactagcaggccttgcagagccactatcgaaaatacttgtcccccaccagccccaatagcccgtagcatcgcgaactgggattgctgggcacgcaccatcatctggaaagtgttggtaataataaatgcccctacaaacagggctatggccgcgaataccagtaaaaacacgttcacaaaatctagagaactggcagctgcggtattgatttcatcgttatattccgcctgggtcatcacctcggcagtgtccgaaaactctttattgagtcccgcgcgcagcgcttgggaagacactcccttttcagcggtgatagcaatcgcggtagtggctaccggcttttgagccaggactgcaaaagcgtcctcggctacgaaaacatagttagtaaaagccaccggggaggggaaacgataaatcccggtaacccttaccgatttcccctcgctggaaacataaactttcaggcgctgatcagtggttacccctaggcgtttagctgcagattcctctaaagcaacctcgccgttactctggggagcctggccttttactaggcgcggctgagcggaatgacccggataaatcgcttgtaaaatcgaaacttgtttgccgttacccagacgcttattgtcctggtcagccagcatacaaacatctaccaaataggggtcggcatatttaaccccagaaactttctcggcctcacgcgccgcctgcacgggcacgctggatcgcaccggtgcttgcccttccactttttcgccttgcacctttcctaccaggtaatagtcgtaggtgttggtggaggaaatcagagaattgtaggagtcggcgagggtggcgcggagggcgaaaatcccggataagaaagccacccccagcactaccgccagcagtgccatttggaaacgtagcaggtgggcgcgtagattccgccaagctattctaatcatgctttatcctggggagcctcaaaagatgcaatcgcgtcctgagaggaatcgagcagtgcctccgccttcttgatcatggccagtaggcgctgtttttcctgatccaaggtttcttccggagtccgcggtatcggcctgttcttttcgcttccctcagcttttttgtcggtttggacattaaaatcaccggtgctactggttttcttaataggggtattgctggggttggcgactgcacttgtcgtttggcgctttgctgccgcctcgctattgggactttctcccgaacttactgggcttttagtcgccgaagttacctgcttcccggagggttgtacctcgcttttacccgtgggcgtgtcctcccaaaaaccagaagtttcgttcacgggattagaaaatactgaataaaggtttgaccagcgtttattctcgtctggttggcgagaatctttcccggagggactttttgacgactgctgggggcgggtagcagcgactggcgaggcagaagacttagcaggcgtcggtttttgactcttttctggctcgggcgccggtacctgctgtttctttaccggcaatttcctggtgtcgccactaccagtaactttgctcttagaggttgccagattcggttgttgcttacgttgaggtaggaaagaatctgcaggcttgggggaggctccccctttattcttgctggtttttaccggctcttggcccggtttaggagtccacccctgccaagtggtaccccgctcatcatgggtttcccacacgctgccactaagttgtggcgtggttttcttagagagtgccgtgggtttggctggaggggtaagtttgccggtagagggggttggtcgctgtgaggcagttttcttaactactttgggggctagcttgtctcctgcgagggcgcgtcgtgctccctccttagtacgaagttccgcaggtaccaccggtttagctggccccattaaagcatttagcgccccgggatctatacctgctaccgagttggcgcttgccggggtagaaagcggtgggcttagcttcgggctagttttagcttcgattttggctccccgtgccacctgtaagtttgccagcttttcttgcatcttttcgcgatcaggccaagaccccggtttaccacttgccggtaaaaattccttacctttttgcgcagtggtttctagatcgctagaacgctcctgcgaccttcccaaagcatgtttttgcacgaactgtggcagctcggtttgtgctgccaacacccgttcgcgttcaggatgatctagttcggcaacgattttgccgtctaaaaggaaaagtacccggtcggcataggcggcagccgacgcctcgtgggtaaccatgactactgattgcccaaaattattgactgcttcccgcagataacgcaacacttgctcagaggattcagaatctaagtttccggtgggttcatccgcaaaaagcactactgcatcttgcattaaggcacgggcgcaagccacccgctgttgctggccccccgatagttctgaagggcgatgagttaagcgatcttccagccctaaagccgcaaccacccggtcaaaacgttcttgcgggactttgcggcgggcaatctcgaaaggtaacaggatgttctctttggcgctcagcgtgggaattaggttaaatgcttggaaaataaaaccgatatggtcgcggcgcagccgggttaggcggcgttgattcatccctacgatttcggtgccatcaatcttgatagagccagaagtagcagattcgaaacccgctaaacagtgcatgaacgtggattttccggaaccagacggtcccataattgcggtgaagcggcgccgggcgatccctatggaaatatgatcgagggcgcgcaccttgccggcaccagaaacgtaatctttggtcaagttattgaccgtaattacgggatcagaaacgctggaaggcaatttgagtccagttttgaggcgggcgtctgcggggttcaccatgtgttttatgttatcgcatctggcaagaggtgctggtagtgccactcgcgccatccgtgcacaagggtgaataatccttcggtttcctggcttagttatcgggcggtagcccccaaaatattctgcggctatggtgcaaacagctagctgaaaggggaaaatatggcgagcgaagtggcgatagccgccagtatcagctccgatatgaggcaggcggcaaagctggctgctaccagtgcggggcaactggggggaatggatttgcggaatcagtgggaatctcgcgcagctgatcatgctcaacgaaagttgcgagacagcgaaaccgaaatgtccgggcttgcgcaggcggcaatgacagcagccaggttagcagaacaatctgcgcgcgtattgctggcgttgcagcaggcgggaaagatgtaagcaagcccgtgtctagcaatagtaaactgccacctatcagcgttattggcgggcatcaaatgggtattgataccgccactatccgcgccagtgctcacggtttaacgcaaccggcagccagtgcctcgcggataaaccagaccgcgaacgacgccctcgcggctgccgccaacctgccgcgcatccctgcagtggaagcgctaatccaatccttgctgacactgcagcaagcagccgccgatactagctcccacattgctgtcctgcgacgcaagctactgacgacagccgaccgttacgaaaacagcgaagctcgctcacggaaatatatttcctccctagactcgtttccacttctggtacttggcgggggcatgattggcaccttagcctggaaagaatgggataagaaactggccgctgatccgctgtggattaaccgacccacctggtggaacgataatcctctgctggcatttataggaaacgcgaatcaggaataccacggaatgctgctcgctttcccttctgccgctttagccggggacataaaacaatcccgcggaccgagcagcattaaagtagcgccaaaaattggcggtaaacgcagcaaacttccggttcccctggatgcttacgggttggttaaccagttcaaccaggcgaaagcctatcaagatcatggggaaatccgggtagttaaataccgtaccgggaaaaagattgcctggcgggttgatattcgcggcacccaggtgtggagcgctcgcgggccgcatccacaagatatgcgcaccaacctgcaaactaatgcttcgggattggcgggcagttctgatatgacaaaagcggttacccgcgccctcgatcaggccggatatcatcgcggacagccggtagaactgattggacattcccaagggggagccgtggccgcgcagatgggatcgaatccctatttagcgaagaaatataacgttaaaagcgtggtgactatgggatctaatatcggaagttttcgcccggcgcggggagtgcatatggtggcgttggaaaacggtgccgatgtggtgccccgtctagatgggcgagccaattccaatgttcctaacctgactaccgtgcagacctacaaggatcatcagtctctgggtgccaatcactctaaagaactctatgcgcagatagcgaaggcttggcaacgctcgggtgatggtgactattaccgttttgtggaggcgcgtaaccgcaacttagggataaataagagtactactgccagcgcgcaatcctttgtagtgaatcgggtggaagctccgcagccgaaaagttcaaaggcttttgaaaagttggtgcaatcttggggaaagagttagcccagtaaagcggtagcttgcttttaaaaacaagtgacccaaacggcggcgattaggcgggagaaaatctgcggaacttaaaccagcagggtaattagcgtcagcatcgccactgcaatctcgcagaatcctactcgcgaaactgtaactagctgcggagagcgccgctggagcaggggtactgccaatgagcgcgcaaatagcagcacccaaaccagcaggtgccaccaggttacccagcccaaaataaagaaccctacgacgactgcggttaagacggcgtgacaggcgaccgaaaacgccaagaatgactgggagccgcgttggcgtattagggaacgtacatagggaacagttgaccaatagtaggaggtgactatccaggccactaccagcatccaactccagccttgcaggttgccagtgggggaaactacccattcaatattgctggtggcagtatgttctagccaggaaatcggggcaaaagaacgagcaaattgagtcccaatgtcataggcgactagggtcattactccggttgccaagatggtgctagtgcgtgccaatagggaacgttcgcggtgacgtactgattcggtaaccgcaattatgatcagcgggaagaatactattgcccactccagtaagggaggggctagcaaaaggcaaataattcctaaaatcagggttattgtcccgtagatttgcaagggcttgaagtagcggtctttacgacgggagcgcagccagattccccccacgttaaacgcgaaatatccgcaaatccacagcgcgaacactaaccagtggatccagcgcagtgaagattcgatgactccaatccagtagggcagcagtgccatcgcataggcaccctcttgcgcaggtacccacccggcacgtgcccaccgcccccagcggtaatcgcttttacctgttcgctttactgatttactgcttttgtctttacctgcttttttctctttgaaggaggtatcgtcgctctctgagggcttagaaagttgcgaaaactcggtgctagtaacccgccgaaaccgagaagtacgcgcttttactcccggcagatgcagtttttctaaggccggtgacacttcttccttcaccgacgtgacctcggaagcagccggagtgtcttctacaggcttctcggagttgctatgaacggcatctctcagcagaggagcccgaaccttttgaatatttccggtgttgggtacggcagtcaccccgccagtggcggtaactgccgatccgtcctcggcgctaaatccctgaggttttcgggctaatagtgagcgacgttgtggatgattcttagggttcggaaaagcatcttgggcggcgggcgcatttagagaagagttgggaatagtgctgtgcggctctagctcctgataagggacattagctcgcttttccccatcctcgcccgaaatattttcgggtttttcggctccgtacgcttttgacacaagggtaacggtactatgaactaatgagattcggcttaacgctggctcacgaagcggcaacgattcggtatcaattagatatataagcgccggctacagtacttaataacactttggtcacaattttaacaagggttcaaagcgcgatttttcttatttaagatacatttgcgtcagggaatcctgtgctttttatccgagctttgattattaaaagtgctggtaatcgcgttttaaaaaagagatagctttttggcgggatcgccgccctaaggtgaaagcatgactgaagttcgtattcatggcagaggcggacaaggggtcgtaactgcagctgatctcattgccttcgcggcgttcaccgatgggcatcatgcgcaggcgttcccttcctttggttccgagcgcaccggcgccccggtagtttcctactgccgtattgaagataaagagatccgtacccgcgaacccgttcaggaacctgacctggtggtggtacaggatgccaccctgctggcaatcatggacgtattttcggggctgaaaccggacggcttcgccctggtgaactcggcaaaatctgcctctgaactggggatcgaggaagtggttgctgcccacccgcaagggcatgtggtgatgattccggccaccgagatcgcgaagaaacacctggggcgtcccctaccgaacgcggtgatgctggggggagcggccgccctcaccgggctggtgcgcctatccagcgttacccaggcgattcaaaaccgtttccacggcaaagtgggcgaggggaacgtggccgccgcggttgccgcctacgaaatggtcagctcgatgaaagaagaggccaagtaacgtgctaaaacaaattgaaggttcgcaagctattgcgcaatcagttgccgcctgcagcccggaagttatcagcgcctacccgattagcccccaaacccacatcgtagaagcactatctgcgctggtaaaagcgggcaaaatgggcagcgccgaatacatcaacgttgaatccgagttcgcggccatgtcggcgtgcatcggagcttcggcagtgggggcgcgcacctataccgccaccgcttcccagggactgctctatatggttgaagccgtctacaatgcctcgggcctgggcttaccaatagtaatgaccgtggctaaccgggcaatcggtggaccaatcaatatctggaatgaccattccgatactatgagccaacgtgaatccgggtggctgcaactattcgccgagaacaaccaggaagcctcggatctgcacgtgcaagcctttaggatcgccgaagaactttcggttccggtaatggtgtgtatggatggcttcattttgacccacgcggtggaacaggtagatgtaccggaaaaagagcaggtagaaaagtttttacctccctatagtcctcgcgtcgtcctcgacccggctgatcccattactattggggcaatggtgggtccggaggcctttaccgaagttaagtaccttcaacacgtaaaacagttgcaggccttagagctcatccccaaagtacaggcagagtttaaggaggttttcgggcgcgattcgggcggtctagttcgcccctaccggctcgaggacgccgaaaccgtaatcgtggcgatgggatcggtgctgggcaccatcaaagacgtagtcgatgagcggcgggacaaaggtgaaaagattggggtgctggggatttgctccttccgtcccttccccttcgaagaggtagcaaaatatctcgggaatgccaaacgctttgtgtgcctcgagaaagccttcagcttagggatcggcggaatcgtggcttctcattgtcgctccgccctctcgcgagccggaaaatccgttcgcgactatgaagtaatcgctggtctgggcgggcgaaacatcacggagcgttccctaaatcaaatgctagatcaggcagtcgcggaccagcttgagcatttgaccttcctggatttggatcaggaactggtcgaagccgaactggagcgggagaaagctactcggcgttctggtccgatcagtgaaaacattcaacgtcacgccactcagcgtgccaatgcggcgcgcggaatctaggaggcaggcaatgtcatcaactatgagtgttccgcttccggaaccgcagtttcgcgaaagcgttgaaaccgcgattccggcacgcgaaaatgtaaagttttatcaggtgggttcctatgcggtcggtaaccgactggcagaactcgattaccgttccgttcagtcagaccccaaccggatcaattccctaacttccggtcaccgcgcctgccagggctgcggggaagccctgggggcacgctacgccctcgacaccgcaatggaggcggcgggaaaggacctggtagcagtcaacgccaccggctgcctagaggttttttctaccccttacccggaaactgcttggacgattccctgggtgcactcccttttcgggaatgctcccgcagttgcttctggggcggcggcagctttgcgcgccaaaggcaagaacacccgggtagttgcccagggcggagatggcggcaccgtagatatcggcatgggctgcctgtcaggcatgttcgaacgcaacgacgacgtcctctatatttgctacgacaatggcgcctatatgaataccggggtacagcgaagcggcgccactccgcccgcggcacgtaccgccaccacccagccggtaggcgaacatcctggaaacgtgtttggccagggtaaagatgtgccgcgaatcgcgatggcgcacgaagttccttatgtggccaccgcgacggtagcggatttgcgcgacctggaatacaaggtacgcaaagcgatgcagttccacggttcccgctatattcacgtattggtgccctgtcccctgggctggggctcggcctccaacctaactattcgcctggcgcgcctggccacccaatgtgggctgttcccagtgtatgaggccgagaacggggaaatcacttcggttaccaaattgcgccgcccggtaccggtcaccgaatatatgcgtccgcagcgccgcttcgcccatgtgtttaagaaggggcaagaggaagtgctagagcggatgcagcaaatcgcggatcgtaatatccgccgttacggcctgattgatccggatcagctggatgaggacgtgctggagcgcatcctggcggcaggcgaagatcccgagggtcgctacactcaacgcattatcgaagaagcctcgaaagctaaacgcacccaaagcgatgctttttcaacagatgatcaccccgtttccggggcaacctctgcttctgcgatgcgtcatcttgccggaaactcggctgcaaagggggaaaactaaatgagtgaaactgctctgcctacaccggaggtacgcagcgaagataccgctccttgggcggtgaccttgaacgtggggtcttcgctggcgaacgaaaccgggtcttggcgtaccgaacgtccggtttatgtatccatgttgcccccttgtaataaggcttgcccggcgggtgagaatgtccaggcttggctttatcacgccgaagagggcgactacgaatccgcctggcgtgaaatcatggtaaataatccactacctgccacgatgggccgggtttgctaccatccttgccaaaccgcctgtaaccgcgggcaaatggatgaagccgtagggatcaacgctattgaacgtttcctgggcgataaagctattgaagaaggctggaacgtaagcgtagatgcggctcccagcggtaaacatgtgctagtggtgggggcgggcccttccgggctgtccgctgcctatcacctgcgccgtctcggccacgaagttaccgtaaaagatgccggtccgatggccggcgggatgatgcgctttgggatcccgaagtatcgtctgccccgcgaggtgctcgatgccgagattaaacggatcgaggatctgggggtacgtttcgagttcaatgccaaagtcgaaaatgttgacgatgtagcagatgactttgatgccgtgtttttggcggtgggtgcccatattggtcgtcatgccgatattcctgctggtggctctgcgaaagttatggacgcggttcagctacttgccgatatggagggcgaggacaagccgatgctggggcggcgggttgttatctatggcgggggtaataccgctattgacgctgctcggactgcaaaacgcctaggcgcggaagaagcggtgattgtttatcgccgtaaccgtgaccggatgcctgcccacgattctgaggttacagaggccgaggaagaggggattatgatgcgctggctgtccaccattaaacatattgatggtggcaagcttacggtcgagaaaatggagctggatgagaacggtttcccccagccgaccggcgagtatgaagaactcggtgccgattcggtggtgatggcgttaggccaagaatccgatttgggtctagtcgagcgcgcccacgatatcgaaatcgaaaagggtgtagtccaggtcaactcgcaaatgatgaccgggcgtcacggcgtttttgccggtggtgacatggtgccttccgaacgcaccgttacggtagcgattggtcacggcaagaaagctgcccgctatattgacgccttcttgcacggcaccgaataccacaagcccccggtcaccggggacgccacctatgaccgccttactaactggtattacgcggacgctccccaccgggtacgcgccaagatcgaatctgcccgccgggcttctacctttgacgaggtggtgcagggcttagatcaagattctgccctctttgaggcgcggcgctgtatgtcttgtggcaactgtttcggctgcgataactgtttcggagtctgccccgataacgccatcaccaagatcaaacctggcgagtacgagttcaagtatgactactgtaaaggctgcgggatctgcgccgaagagtgtccttgtggctccatcatgatgattccagaggaaagctagggaacttcgggggaaagcgccctgcaccgggcgtttctgtcccgccgcccgctgcgtcctcgcgctaggtttgggtgcgtaaatacgtcctggtttagggcagtgcgctatttttgcctgcgccttcggctgcacttgggacgcatgcgcccttaaccggtaatcaggcgtgccagcgagtaaatcggcaccgaaataaacagggtgggcagcagggcgagtgccagttgtcgccaacggtaattcttacctgccggcaccataaacaatacgttgatgcaggccaccaagagtccggagccaaatcccaaccccagagtcataacccagatggccaaggcggggttacggtaggcaaagggaatcgccagcgcgagatccgaatatccgtaaagtaagaaataggtgaggaatccggcggcaattattccactcaaaacacagtacaaccagcggatactagcacgtttagcaggcagagccagggatagggaagctaatcccatagccggaagggccgccattgccagcagattcatagtggggtaggcggtggctagtccccaggctgaacctgcagctaccagcgcacatccggtaatagtgctggatagcgaccaggtagtcagggggcgatgtttcccgcgggtcatttccgcgatgaacgctgccaatacgcaccaggaaagcaccagtggtacccaggtgagattagtagtaattaaggtagcgagcaggcacccgattccggttagcgccaccacgatgccggtgcgcgccgggctgggagcttgagaaaggccgccccaggtgagggcaacggcgatagttaccgcggcggcgatgagcaccaccaggtaggggttccaatgcaggaaaaacagcattgccaggggaggcagtgcggccagcagcgccacccaccagctgcgggcagctatgggggaaacggattttttcgccgacgaatctggcagtttcgatgactgcggtagtgcggaagcatggggtaggttaggctcactccctttgcgggatgccccctgaggactagctgccgaatcttccatatttttgatgttctcccgattttgctcttcgcccaattacgccagatttctggcttgctgcttccttactctactaggctatagcccatgatggatttacctttaggtttggcgaaagaattaatccccctggcctggttattaggctcgtggcggggctggggaaccgcatatctgcctaaagacccggaaaatgaaaacggcgagcgcgaagaatgttttatttggcaagaaactactttccgcgctaccggcactaacttgcagcaagtaactcttacttggctggccgaaccggtcgcagaaaaacctgatatgcaggccgatgcggctaccgggctttcgcagctgcggcgcggcgctttgatatggcgggaggatacttcctggcgagtgaccgcttcggcagtcgccgatagtgagcaagaggcgaggtcgcgttgccgcctgacttcctccggcggtccctacaccgcagaggtttcttgggaggcagtctcgatggggccgcggatcatgatttcatctcgccgggctcctgcccctttcgagcagctttcgcgaatgatggggctggtttcttcggagctgttctgggcacaagactcggtgctgccaggtaaagactccgaatctgatttttcggcgcgcctgctacgcctgcccgcgggagaggaaaccttaactgcccccggggtgacttctttacctgccggagaggaccctcgcggggatctagataaagaggaagccgcggcgggggaagagaaaaaagataacggccaggcagccgaaggggagcgcgaggaaactcccgacaacaatggggaagcaggagcctaaacgtgacttttgtagacaaccaagtggctctgcgctgcggatatgggattgcggaaaccggcctcgaggtactgacggtttatggctcggatgcgccctcctggctaaccactctatcttcgcaggtagtaacggatatggaggcaggggagagccgggaaatgctgttcctggacgctaatggtcgtatctcctatgcggccggaatcgtctggtcgcaggatattgcctggctatttaccacgaatgcgcaggctctagcgcaattcctagaatccatgaaatttatgtcgagggtggaagtttcggtacgcgcagacctcacggtttggggatttttcagccctagcgttgccgaagaagtgctcgcaactttcggccccatctggactgacccctggccagggataactccgggcggaaccgcctattccccgcgtagtgaggagcaccccgggcaagattacccggcgcgtctgggggttattcccgatgcggatactgcccaggtgcacacggaattgcgtaaacgctgggaaaatatttcttggtcgctggaaactgaggacggctacagtctttctactccggcgtttgctactgaggctgattggcgggcgctgcggatcgcggcttggcgcccttacgccaccgatattgacccgcgcactctgccgcatgaactggattggctgcgcactgccgtgcatctaaataagggatgttattgcgggcaagaaaccgtggcccggatagttaacctggggcatcccccgcggcgggcagtcttcttgcaccttgacggcagctcctcgctactgcctcctgtggatgccgagctttattccggcagtcgcaaagtgggtactgtgcgggcaagtgctaatcatttcgaggacggtccgattgccttgggtctaattaaacgtactgctcccagtggagaactcactgtccgttggcaagagggcgaggaagaacattccctggcggctgcgactaccgcgatcgtagatccttctggggtttcttggctgggacagtcgcggattgatcggaaagccttttcgggcgcctcgccgcgtgcgggttccgggtcgttaactatcgggggctaggggatttcatgcgtaccttaattcaaagagtactgtctgccgaagtcacggtggacggtaaaagcgtcggtaagttggagcgccccggaatagtagctttcgtggggattacccccggtgacgggcaggcacagattgattggacagtgcgccgcctgcttaatcaacaaatttttgaggacgggtcttcggttctggaatcgggcgcgccgctcctggtggtttcccaattcactctgtatgggtcggtgcgcaaggggcggcatccctcctggacttatgcggctaaaggtgaggtggcgcgtccagtatttgagaagttggtggcagatttgcgcgcgaagggcgcacaggtggaaaccggggtgtttggggcgatgatgcaagtgtccttagttaacgacggcccttttaccttgtggttggcaaaagaacccgagggttttgccggttagctcgaggctttggtgacacttagtcagctaaagtattgtttgccctggtagcggtgttgtttctaataattaggggtgctcgcagtggtcgccctcgtctaatgttcacgaaactctaatgtttcttggggtattttcctggggcttttgtcctgtgaacctctacacgttttttggcgtagctaggaatgtagtgaagctaatctccctggtagcaggggatatgctggcaagaatgcctaaaaaagtttgagaaaatcttaagaatttgttgcgtcgttctatgaaaatcttgtaagatggtaagtgcattaaaatatattaactgcacatagacaagttaatagtgttcctgtcggcattgacaacaggccaggtccctccaggcggggcgtttgggcgtgacataacccagacgaacgcctcgtcaggatctgttggtggagatgccgatccctcccttctagtagacacaggataaatgatgattaacagtcaaactgcgaagttgttgcggcgttggatcgtcgctggattagctgccgcattagccctggcatggactatcaccaccttggtagccccctcccaggcctcggataccgagaatgcccaattggcgaaagatttcaaagccgttgaagcgggtatgagtttcgaagagcaagaggacggaaactgggatatacctaatccgcctttcgccgcgggtactaaattctggccggaacaattcggtcagaggaacgagcattggtactctgatgaggaaaaagccgcgtacaacaatgcgttaaccgcaagcaatgggtggtcaaatgactgggaggtagaattccccgacacgtttcggatgcataacgcgaattacctgatggtgaagaatcgcggggatgtctatcgcgatgctaataaacagggagttctaactaaagcaccggaatactataccagtgcattctgcgttcaacccggaattgcgatcgaccggtcttggttagacccgggtgagcccggacacgccaaagaaccaggcttgaaagtatctattgatgctgatgaacgtgttggctatgtcgacacaaaatccaaacgcttggtgtctgaccctgatattcagcgccagttgaaagctctggcttatatctacaacggcggggatcgccgtctaatggatgtagacacccgtttcccggcaggcaaagatttttacacgcaaaacaaagtgctcattgaagagcacaaagccgctcttgagctaatgaatcagctcgaccagtaccagaagaatggagctgcccaggctttagtgtgggcaatcgagaagaattctcccgcagagggaattactgtctatcgacatggtgccatcgactggacggttaccaatgcggctcgggcgatattgccgcatattaagaacatcgccaatgccgaaatcaaaatgtggcaggcatatcaagcgcttaaagaacagcaaatcgctgatgagcaagcctataaagaggcattggcaaagtggaaagcggaaaccgccgccagtatggccaaggatgaagccacctatcaaaccaataagcaactgttggagtcaattaaactcagcgttacccgtgccgatgatactcacttccgggtaaacctgattggcagttccgaagcaatcgcgctgctgcaagaagctaagggcaaattggaaattagcggatctagcaacctcgagttacccgccgacacttccatcgccaaggcagcttcccccggagggattttagtaggcattaagttcgatgctggcgctgcctgttccggtaaagcgcagacagcgagcatcaatgcctcattcaatggcagcattgagctcacccgcacttatatattcaagaactctaagaaatttgttcagttccagtcccaggtgaacttgggtaagtatgccgtagccgtttccggctccgcctccagctcgtttgaattcacttctacttgcccggaggaacctaagccgaagattgggaccactttggagggcgaagatggagccaagcagatcgataccgctggtaaggcaggtaccgacagcgtaactctcatcgataaggtcaagtttgaaaaccttaagggcggacagaactacgtcattaagggtgaattggtagacggtaatggcaaccccgttaacgtgaccggcactagcaaagccttcgatccgaaagcctcgggtgctaccgacaacggcagcggctactattccggaaccattgatatgaccttccaggtgccggtgcagaagattcgggacaacgagaagctagtagcttacgaaaccctatacaaaggcaccacgcctgaagacggcaaagaagtcaccaaccacaaggacaaagatgacgccagccagaccgtaactgaaaagccacggattggcaccactgctaaggtgaccagcgaatccgacgctagcggtaaagatgcacgtcccgccgaaggtgcggatgtgacgattaccgataccgtgaagtggcacaagttgcagcctggtagctacaccctcagcggaaagctgatgaagaagagcggcgaccaggtaaccgaggttcccggaaccgcgactgaaaagaccttcagcgtttctggtggtaagaccggcacggtgacgatggatctcaagctacctgcaaaccaggtagaagccggtgcctcctatgtggtgtttgagaaagtctataagggcgcaaacaacacctccggtgagccggttgctacccacgagaatccgaacgatggtggtcagaccgtaagcgtcaaccccaagccgcataagctgcccagcattgaaaccaaggcgtgggtgcgtgatgacggaaactcgctgatcagctcggtggaagccgatgggaaagacttcaaagtcaaagaccagatcgactacaaagatctcaagccgggcacctacacggccttcgcctccctggtagatgccagcaacccgaagaacgtgattgccagcggcagcaaggtatttaccaatggcaccgaaaacggctccgctaaagttgagctgaaggttgatggctccaaagtcaaagctgacgggaaatacgtcgtttacgaacgtatctaccaaggcgaacagaccactgagccgaagagcgacccctacgcgaaacacgaaaatattaacgatggatcgcagaccatcacggtaaccccgaagaacccggtacctgccgagtttaagatcgtgaagaagactgtagacgataacgcgaataccgatcgagtgttcgacttcgatgtatcctgcgatggttacaagaccaccgccaccgtgctggtgcgcaaaggcaccacccagggtgaaaccacggtttccaaccgcgcactaaccagcggtcagagctgccaggtaagcgagaaagaagtaagcgacaacctaaatacggtgaaagtaaagttctccggaactgacaccaaccgtgacggcactgttgcacagttcaaactaactgagggcaacgccaagaccgtagtggtgactgcgaccaacaccttcaccccgaaacaggcgaagttcaccgttcgcaagaacgtagaagcagccgaagtaaagcacttcaacgtgccgaactctttcgacttctcctacaagtgtgacggtgatagcacctggacttccctacctgctttgaaggctggggagacctcgcaagctatttcggttaagcccggcatccagtgccaggtgaaagaaaatagcgccaccccgcagaacctcaatcgcaccctggaatggactggtgtgcagagccaagcgggcgggattgctactttccgtaccgatgccaataacacggtggcactggtagccactaacacctacaccgagaagaccgggaaactggaaatctccaagcaggtagtggaccagaccgccggtgcgggtaagattcctggtaccttccaaatgaagtacctgtgtgctaccggacaaagcgccgatagcattaccgtgccgctaacctcggtaagcgtaaacaagaactctacggtaaccatcaccggtattcccgtaggttcctggtgcgcggtagccgaggacaccaccgggattaacgtagcgaacaccactttgaccaccagtttcgatggcaaagctccgcagatggtaaccatcgggggacagaccctgcataacgcggcactgtccaacccgattcaggctggggaaagccaaaaggcgactatcaaagtcgaaaacaagtacgtcaatgaaaaagttggcggattcgaagttaaaaaactagtctccggagtagtttctcccgaaaccgtcctcaaagacgtagccttcgactttggttactcctgcaccattcccggtagcacttacccggtaaagggcaacttcaagctcgagcatggccagacgttctccagcgccgatcccactcgcccgcagcttaacaacctgccggtaggtaccgaatgtaaagtttgggaagaaactccgaaatcggtagaaaacgccgattatgctggctctagcatggaggtaagtggtaccaatggcgccgaagtgaccggaactgacggcaagctggaagtaaccctgaagctgactgctccggccgcgaaagttaagatcctggctaccaacaactacacccagaagcttggtgccttcaccttgaagaaggtagttaaaggcagcgcagatcaggggctagatataaaggactacaagttcaagctgacctataaggatggcactaccacccaccagaaagagcaaaccatttctgctggtggatcctactccttctggggattgccggtcggaagccaagttaaagttgaagaactcggcgctgtcgacagcaagggtaagttcattccggtaaacgagctgtccaccgccaaggtgaagcactccatcagctggaacggtagccagaacgattcttcaaccgcagcctccaacaccttcactatcgacaaaccgatgacgaaggcacagtggcttaataacggccaacaggggaacgtggtagttgaagccaccaatacctataagccgatcgaacaaaagggtaccttctcggtacagaagacctcggtgagtgtagccggcgagggcaaagacaaggtcaagaacctgcccaccagcttcaacttcacctacaactgcaccgatggcgcccacggtaatatttccaacgtgaagccgggcggtgagccggtagtggcgaacgcccagttccgcgcaggcaccgtctgtaccgtaactgagcagcaagtgctacctaaaggcaccaacgctcaaaccgttagctggacagttgacggcaagggcgcaggagtcggcccggcctccggacaaagcgcgattatcaccatcggtgatgatgccaagactccggtagccgtgcaggccgccaacgaataccagacccccgatcagccgaagatcgcgaccgagctgaaaggcgaaggacgcggcggcaatatcgacctggtagaggatgcggatcatacctacaccctgaccgacaagatcagctactggaacctgcaggtcggtaagacctacaagttctccggcgaactggtagtgcccaacgcagataagaccgatgccaccggcaccgggattaccgccgaaaaggaagtaaccattacttcccccagcggcgtggtggaactaccgttcaagctgagccgggccgatgtagccaagtactcgacactagtagcgttcgaacagttggatctgaaagtcaacggcggattcgagccggtcaccgaccacaagaatccgaaggatgagaaccagaccaaacaggttaacccctggattgcgacggtactgaccgacgagggtgaaaacaagcagattgacactaccggtaaagccgataccgatctggtcaccctggttgacaccgtgaaataccggaacctggaagcgggtaagacctatcacttgaccgggaaactggttgatggtgctggtaacccgattggtgtcagctccacctccaaggcattcaccgttccgggcgaggcaggaaccctgcagtctggcgaagcccagatgacctttaaggtaaccgtggcacaaatccgccagaacgcgaaactggtagccttcgaatacctccatcccggagagccgaacaaccccggtgacgaaaccgtggtcaccaagcacgaaaacccgaatgatgaaaatcagacggtaaacgaagggccgcgggcggcaactaccgctaccagctcgactggtaccaaggtatttgacgccaagaccccggctaaagtgcttgaccgcgtcagctgggcgaaactgcccgccggcaactatgtgctggttggaaccctgatggataaggcaaccaagcaggcggtaccgaacgttaaggcgcaggtcgtcaagttctcggttgccagcggtgagctgcagggcactcaaggaatgaccttcgaggtgcccgcggatcaggtgaaagccaagtcgcagttcgtagcgttcgagaagatctaccgccagggcgatgtcgatgaaaacggcaacgtgattggtggaaagactccggtcgttgaacactcggatattaacgacgaagcacaaaccgtaactattggtgaagaaccgcaaagcccggtcactcccaaactcaccttggaaaaggtagttaagagcgaaggactagaggttccctccaccaagcagtttgccttcaccttgaagtgctccagcccgattgatggcaagtcgcaagaaaagacctaccaggtaactgctgggtcgccgattgacctgccttacgtcaagggcgctaactgcaccttgaccgaggatagcgcagcagccaaggtagcggggattgccccctctcaggtagagttcagcgcgaactctaacaagattggtctgattagctctgataactcggcctccttcaagatgccgaaagaagagctcaccgaagtaagggtggcgttcaccgcgaccaacacctacccggcgccgaagaagcccacggtggcgacctccgctaaggatgccgaaggcaccgcgggtatgtacggtcaaaccaagcaggctaaccaggtttacgctggaacctccgccaacattgtggacgaggtatcttgggcgaacctgctgcccggtgattatgtactgatcggcaagctgatggacaagaagaccggcgaagcggtcacttcctactcttccgcccccgcaccgttcacggtgaaagagggcgtgaagaacgggaagttggagaacaccttcaccgtcagcggtgactcgttaaaggctggcagccactacgtggtttacgaatacatttaccgcgcaggtgatgtagagggtgtaaccccgaacaatggcgccaagccggttgtggaacacgcagtactcactgacgcagaccagacggtggaggcgattacgcctccgaccccgccggctgcgaaagtcaagattaagaagcaggttgtggctaccggcatggatgtgcctgtcaaccgcgcctactacttcaccgtgagctgcctggataaggacggcaaagccgcaaccaccagtacattagcggtacgttccggcgaggaaaccgaagttaccggtttgcggactggctacctatgctcgattaacgaggatttgcgtaacgccatcgaccagcaggtaaccccggcaatcgcgctgaccagtggaactaacggtttcactgtgcagcaagactccactgcgggttcggctcacttcaccgtgccggcggcgaccgaccaggtgcccgaagtgctggtgaacgtgaccaacacctacaacaagatgggcaaaccggaactgcaaactcgggcggtaaccgataacggcagctctagcgtgcaggcgggaaccgcaaccacggtaaccgatactgtcacctggaagaacctgccggaaggcaagtacctgctcaccggtaacctcatgcacatcacggataacaacgctgccccggtagcgggagttaccaacgaaccagtggtactggaaatcaccaaggacaactccttggcgggcagcaccaccatgaagttcaatgtgcctacggaagccatcgggaaggccggaaagtacgtagtgtacgaacacctctacaactacgaagacactgacggcaccaaccccaagccgaacacctcgactgtggtttcccacaatgaccccagcgatgatgcgcagaccgtgaccgttaccgaggctccctcggtaagtaccactgccaccaccaatggggaaaatgaaaaggaaatccaaaagggtaaggatgcggtagtaaccgataccgtcaactggaagaacctgcctgcaggtaactaccaggcgctcagccaactggttgatatgaagggtaactcggttgccggtgccaccactaaggcggttcctttcaccgtgaataacggcgaaactgcgggcagcctgactaccaagattcaggtaccggcgtcagcgaccggaacctcgggtgcaaagttcgtagtattcgaacgtatctaccgggctagcgacgttaaccccaagaccgggcaaccggctgagggcgccgagccggtagtatccgagctggatctgaactccatcaaccagacggtgacggtagttgagaagccccaggctccacccaagatcagcttcaccaaggtgactgaaaaggtcatggacggacaggtgccggacaaggatcgcaagtaccagttcaccattagctgtgacaagaacttcggaggagccttcagcttcgagatgccagcgggcgtatcggccggtctaccgggcaagcatcagccgcaaagtggtgcggtatgtaccttgaccgagatgctgaccgatgaggcgaatccggatggcatcatgccgaacgcgattagcttcagctcctcgcatccggaaatgatggcggtttcgaagatcaacaaccagactgcccagttcacggtaccgaatgtggatactgatgtgattccggaaatccaggtcaccatcaagaacgtctacagcaaggacttcccagaactaggcacggttgcgcgtgacaacgctgaccaggacaaagtgttgaacctcaagaagggcgaaaacgctcaggttcaagatgttgccacctggaagaacctagctcctggcaagtacaccatgattggtaccttgatggataaactgaccgctaagccggtcgtaggggcgaacaccccgacggttaacttcgaagtcaagaagggcgagaagaccggaaccatcaatgcactattcaccgtgccggcagataatatctctagcaactccagctgggtagtctttgaacgggtctacaaggcctccgatgttaaagatggcaaggttgtgggtaaagctactccggtagttgaccactccaactttgaggacgccgatcagacggttcaggtggtaactccgccggcctcaccggaacaaaagactccggagatcgccacggttgctaagaatagaactaccttcaacgatggaactaaagattcccacctgggtacaccggtattgactccgggtcaagatgcggtaatcgaagacacggtcaagtggaagaacctggagcccggtgaatacaccattaccggaactctgatggataaatccaccaatgctccgctaacctacctggacaagaatggaaaccagcaggatggcgcgaaagctgaacgtggctccttccacgtagcggaaggccaaaccagcggagaggcgaaagtctacttcacggttaagggtgaagctatcgaggctaaccgccagtacgtggtgttcgaggatctctacaagacctcggatatcaaggatggtcagcccacccccggtgctgagaaggttgctttccaccgtgacatcaacgatgcggcacagaccctgagcggggacaaccccactccgggaactccgcccgagacacctaagaccccgaacaccccgggaacaacgcctccgaccccggtgaccccctctcatgggttcccgaatgtggtgcgcacggtactagctaagaccggctccaccactgggatcatggcaatgaccggtgttctggcagtggttgcgggaatcggattagtactaatccgccgctaccagcgcgaagaactcgaggactaggaaagacacataactaaataactagaaggatctcggggtcggaagccaagcttccggccccgaggctttgtatccgtgcctttttcgggggttgaaaatctcgtggcagtcgactaaaaatgctggcgaaaaaggagggtctggctcggtaaaagcaccaaatctgagggcgggggaatagctttttcctcctgcccagagtccgggaaatacctgcggtattttccggactctgggcaggaggaaaaacttaggcccgctttgcgttagttagtgtgtagcttgctgccgagccagagccgcgcgaaggtagtttacatggttataaaggcaaaaatggtaatacaatgccctccctgcaaaaagcagggagggcattgtttataagatttcagaaactatttgtctagtttgtcttttaccgcgtcaacggcttcatcggccttctcggctacattgtgcgcaacctctttggccttgtcctgagccttctctgccgcttcttccggatcgaactcgctcacttccacgtcctcccaatattcttctgcccaggggtcttcaaccggctgggaacgacggtaaagcaggtagccaacgccaccggccacagccgccaataccaggaatagtagtgctttacgaccccgcttcggagctggtttactaatcttgtctgctgtttgtttcttcacttgcttagcagcctccttcaaagactcttcagaatgcttctttacctcgtggaactggtcgcgcatattacctactgcgtgttccacattgggcactaggtcgttgctgaccttttcctgcaaatcctgtgcgccctcaagaacaatatccttgccttgatcggccaggcttcgcgcctgcttgaatagcttatacgggcagcatgttttcatggtagctcctttaacttggatgagccgaggctcccccgcttcggcaacgacaattagtacgcttccagtttagacgttcaagccgaacttgtgggaagaataagccctgggaataacgagatttagtaaggtcgagtatcggatttatagctttcatgagagaataaaagctatggaagcaacaattcacacttcaaaaggcgacattaaggtcgaactgtttccggataaaactccggtgactgtaaacaatttcaaaggtctggctaccggcgaacgcgaatggcaaaatcccgcgactggacttaaatccaatgaacccttctatgacggagtgatttttcaccgtgttatccagggcttcatgatccagaccggcgaccccctgggtaccggtactggtggccccggttatcgtttcggcgatgaaatcgttcccgaactaacctttgacgaaccctacgtactaggaatggcgaatgctgggccgggaaccaacggctcccagttctttattacccaggtgcctacccagtggctaaacggcaaacacactgtttttggaaaagtcaccgaccaggcttctcgcgaggtagttgacgccatcgccgcagtcgataccgatggtcgcgatcgtcccctcgaagacatcaccatcgaatccatcgaaatcagcgagtaactttcatttgtccgccacttcggtggcggacaaatttaactttttggagaaatgacgaatcctaacaatcggctcaatgtaatcaacgtcctcattattgcttgcggtattgtctacgtggcgtcgtggctggttcccagcctggtagatcaattcctgttctaccccaccttgggctttaccgagccttggcggtttttgactgccgcgtttttacacggcggtatcgtgcatttggcctccaatatggcgttcctgtacatcttggggagtttggctcgacgagtgcttagcagctatcagattctcttgatctacctgctgtcagcctggggaggctcgctaggcaccttggcgtgggcactactcaccgggcaacagcaagcggtagtgggcgcctccggggcagtcctcgggctgtgcgcgggcgtattcgtctacacccgcaacctgcacgcctcctccgctgccctgggcggactgctgataatcaacctgttaatcgggttcgtaatccccaacgtgtcttggcaaggacacctaggaggcgccctggtgggagcactcatcgggtgggccttgcacctggtggcagtgatctcgggcaggcgaggacgcaagcaactggggcaagctatcccggatattgtcgatcgccagcgcgccaccgccactgtcaaacgcacccaaatcataggaaacctactggtaaccgtgatttcggttgtggtgttattcgctgcaactctcgcgtgctatatctagatttattcccgcgtaatactggggatagaatcggcgaactttccttatctgcgctctggataactgccttttccaaaaattctgccccgccgtcctcctcccgggaaaaaattagccttagccggtagtgaaaccaggtgagagcgagggcaaaaacctaataatgtacatagtggagtcaattccctaaccgaaagaatcctccccaaagttcaaggagcaaaatgttcgaacgctttacagatagggcgcgccgggtagtagtgctggcgcaagatgaggcgcgcagcctggagcataactatatcggtaccgaacatattctgctggggctgatccgcgagggcgagggcgtagctgcaaaagccttggaaatggccaacatttcccttgaaggtgtccggaatcaggtaattgagattatcggcaaaggtgaaaacgattcaaaagatcatattcctttcactccccgcgccaagaaagtcctggaactatcgatgcgggaggccttgcagctggggcataactatatcggtaccgaacatatcctgttagggctgatccgcgagggcgagggcgtagccaaccaggtactcaccaatctgggtgctgacctgggaagcattcgtcaaaacgtgattcacctgctgtcgggctatccgggagcaaaccaagacgaaaccggcggagaaaccgtgggggtcggcaccggcacccagaagccgcaaaagtccggctcggcgattctggatcagttcgggcgcaacctgtcggaggcggcccgggagaacaagctggatccggtgatcgggcgtatcaacgagatggaacgggtcatgcagatcctctcgcggcgcaccaagaacaacccggtactgattggggaacccggggtgggtaaaactgccgtagtagaggggctcgcgcaggcgattgtgcgcggagacgtccctgaaacccttaaagacaagcatatttattccctagatatggggtcgctgattgcaggctcgcgttaccgcggcgattttgaagaacgcctcaagaaagttttgaaagaaatccgtactcgtggggacattattttgttcatcgacgagattcacaccctggtgggtgcgggtgccgctgagggtgcgattgatgcggcctcgatcctcaagcccatgctggcacggggagaactgcagaccatcggcgccaccaccaccgaggaataccgcaaatatattgaaaaagatgcggctttggagcgacgtttccagccagtccaggtggaacagcccagcgtggaagataccgtgaaaatcttgaccggtttgcgtgaccgttacgaggcgcaccaccgggtaataattaccgatgacgcgattcgcgcggcagcctccctgtctgaccgctacatttcggatcgctacctgcccgacaaagcaatcgatttgattgacgaggccggggcgcgtctgcggatccaccggatgaccgctcctcccgagattcgggaaatggacgagaaaatcaatgaggcgcggcgcgataaagaagccgcaatcgatgcccaagattttgagaaagcggcgcgcttacgcgatgaggaaaaacagttgggcgaaaaacgcgcccagctagaggctgactggaagtccggggagggcgaccggattggcaccgtggatgaagattccattgcggagattttggcgatgtccaccggtattccggtgttcaagctgaccgagaaagaaagcgcgaagctgctgcatatggaagatgagctgcataagcgggttatcggccagaatgaagcggtcagcgccctctccaaatctatccggaggacgcgcgcggggcttaaagacccgaatcgtcccggcggatcctttatttttgccggccccaccggggtgggtaaaaccgagctggcgaaagccctggccgagttcctcttcggtgacgaatcggcgctaatccaactagatatgtcggagttcggcgaaaagcacacttcgtcgcggctgttcggagcgccgcccggatatgttggctatgacgagggcgggcagttgactgaaaaggtacgccgtaagcccttctcggtggtgctttttgacgagattgaaaaagcccatgccgatattttcaacactcttctgcaggtgctagaggatggacggctcaccgactcccaagggcggatggtggactttaagaacaccgtaatcatcatgaccaccaacctgggcactcgggaaatcaataaaggggtgcaaaccggattccaggtggataatgaccaggtcggttcctaccagcggatgaagaatcgggtacaggaagaactcaagcagcagttccgtccggagttcctcaaccgtgtagatgaagtaatcgtgttcccgcagctggggatggaagaaatccgccagatcgtggatttgatgattgccaaacttcaagaacgcacccaagaacaagatatgaccttgaagctcaccgatgcggctcgcgaagaactagccactcgcggtttcgatccggttttgggggcgcgtcctttgcggcgcactatccaacgcgatatcgaggacgccctcagcgaaaagattctcttcggagatatcgagcccggtcaagaaatcttggtggatgtgcgcgagggcgaggacggagaaaaggaatttaccttcaacggcaagtagcctccacgtggtgacgcccgcatccaggttgcctgaaaacagcaactgagtatctttcgtgtctaagttttctcggcaagtctcctttgtctatcatctcgcgataatgtggagttagcagtttttaaggaggacgggtgggcaccgcggaggaacagacagtagaggcgccagacagcgccctggatactgccgtctgctcccgcctgcctatcctattcttggatgtcgacggccctttgaacctttggggtcgggtcgggcgacgcatccttaatccgttgctgcgcgcacacctggtgcatttaaaacccgatgattcttttaatgtgaatgtggtgctgtctcgtagaatgggctctcgcctgcgagacttggggaaatatttccaagttcactgggccacgtcctggaatgaatgggcgaatcagcacctgtctccactgctaggcatttccgaagatctaccctgggtgcggtgccccaacggggatccgcgctcgaagttccccgccgtcatgacttctgcgggaaacaccagttttgcctgggtagacgattatttgtcagaggaagtggcacaggcgacccgcaaaaagttgcagtggccgcaatgtgctctcttggtttcaccccacattatgtgcggtatcgatagcgaagttgtccacctgctaaaatggttttcgcagatacagcgaggggatcgggaaccaggaagacgcgaagctcgtaaagcggtcgctatcgtcagttctgggcgggttgatgcgtggctggttaccccctcgatggtgacttgtttgagtttacgaaagggggcgaagcgccatggctaaactgacggttaccaaggtggcgcagcgctgcctagaactagctgaccagctaaaacctcagcttgctgaccctcgcttgcaggatttacggtccggtatcgagcaaacgcgccgcgctctcacttccggggagttaccgcgctggcaagtaaaaaggctggtagatacagtggctttggtggccatgttgagcggtaaaggtgacctggcggaaaaagttttcgggctctggatgaaagccgggcagtctatttcccaaaatccagcctctttggtcttgcatgctatcccagatttaggaaaaaagggttctgctcaggcagagaaaaacgccccgcccgtggcgcaaccacaggtaaggccggcaccggcaccaccttcggtacagacgccgccactgacatcagttccctcaggtggtgaaggcgcagttgcagcggttcaaagtccgcaacccacccccgaacactccccggaagatgagggagatacccaagcgctggggatggggctagccgcaatgatttcggaggcctatgcttccgccaatccagaatcagcaaaccattctggggctgcgcacgcagaatcttcgccggtaggggcgcaaacctacccggtttctcaggccagtgccaacgttgcagccccggcagcgtcttctgccaattggcgtactcctagcggagaaatgccctggattcccatggaagctggcgcgaatgctgctcccacagtgggcgccagccccgctgccaggccggcagccccagtgaataactcgcctgctgctgtttcagcccaccggttcccttctcgtagctctcttcaacgggcggaactgttcccagagcattcgcccgctagggatagcgggtcacgtcccgcgccgccgccaccccaagtttcacccttaccggccgcgccgccggcagctgcgccgacgccagctctaacaccgccggcttcaccagcggctccactgcctggaaatgcgcctgaaccggtggtgacaaacgaagctccgggagctttttcgatgtcaccggtagtgtccgaacagtccctggctaccagctatccgcaagagccggttaaccctgcccctgcgccggcagttcccacctatcctgcccctgcggcacagatgcaacccgctcctgcgacacctccagtaatgcccacgtccgcccccgcaccgcttcccgcggctgccccggtatattcacctactcctaccccgcaaaccgcccccgccccggcaccggacgtggacttggcaaatgccgccgctggctgggaatatttccaggctctgggtctagattctcagctaaacatgagttttgacgagtttattgcccgcaataaacacgccaccgatagggggcaagcggatgtccactctagggcgccacgctcagcttttgcagagatagaggacgaaatgccagattcggcagctctctacggtgctgagttcccagaggaggcgccctcaccggcagattctgccttacggagggcggcacaaagcccactgttaccatcgcaggtaccacccgcggctccccacaaacctcgggaaatactggcggaggctgaccgccaaccctctacccggttaatcactatccgagtgcgcggttatttcgactacaggccccgttttacccgacctaagcagagcctggatgaaccggcagttgccgggtctaccgcgtccttcgccaaaagtattattcatgccgaaggcccgatgccgctagagttcttggcgcgtcggttgtgccaaaaatatcgggttggttataacgatcggcgccccgatgaggtcgcccgttgtttgggtccaagtttaaaactggtgcctgaaccgggaatgcgcacggtttggcctgccaaaatagaccccctcacctggaacactgccctgcaatccccggtggggttgccccgcaaactagggtcactgactttgaccgaggttgcgaatgcgttgcggtggcagatttcgcgcaccaatagcctggagcgcgcagaaatcgtgcgcgcagccttccagctactctatggaatttctccggtgacaccgcaggttactcagctttgtgatcgggcgatttcttatggaatcgcgaataatttgctggcggccggggatggcactttgtggctgccctgatatttcaggtattttcggagcctctaattttcgagaagtaaaatagctcttaataattagacgcagcgatatatcaatcctggtggcactggcaggataaagttgaagttattaggttcgcagcagaatctaaaagttccccggtttaaggaatagataagatggctttttgtgcgcaatgtggcaataacaattccgatggagccaccatttgtagtatatgcggggctcagttagtcccaggaagcccagatcagacagccggtttcagcgagaaaacccagaacatggataccacccggtttgcctcgcaaaatcagccaaattctaatagcggataccccgggtatagtggctatcccggacagtattcgccggcagcatccccatatccgacagtgggcagcccccaggcggcaccctattacccggcacccggtgcctccgctgccaactatccctatcagccagctggcggcaattatcctttgccggctcctatggcgggtgcgccctcgggaaagaacaaccgcctaccgataatcgcgttggtgagtgtgctggtcatagtgttagtggtgacggtgggagcattgctttacacctttggtccggggtcctctaacgttgctgccgattacgatactttgcgggcagatttgaccgagaatcacgccgactatgattttgaaatcgtcagtagcgacgtgtcggagtatcccacagtgcgactgtatttatctttaaccgatagtaaccatcaagagttaactctgaaatcaccgacggccgccataaaagagaaaatcgccggtggacaggaaatcgagaggtcgataaggaaagtagagagaataaaaaacaatcagggggtcgggttcgaggttctgctcgataaatcagggtcaatggatgaagaccttggggaaatgcaagatgcgatgcgtaactttattaatactctcgactataaagtgggagataaagccgagttgatggctttcgatacctacctgatgtatatgtctactttcaccggcgataaaaatcttctgttaaacggggtttctaatatgaccgccgatggtcaaactgcgctttacgatgctctttacgagggggtaactaacgctggcaaccgcacgggatctaactgtgtgattgcgtttacggacggaattgagaatgccagttcgcacagtttagaggaagttattgctttggcgatcgaaaaagcagtacctatctatttgattgggagtgccgaatccgatttggatactctgcagcaaatcgccgatgaaaccaagggttacctgtgggatattgattcgattgccgatatgagtgaagtgctggaaaagatcaatgctcggcaaaagaatctttacactatcgaatacacatccgacgccaaagccgatgcctatgccgaacgcaccatttacgcgttaatcggtgattctgatgattacagcctgggggcggtcatggacggggtttcttttacgccggtgaaacgttccggtatcgagaagcataagacccgctatgaggcctttaaagaagataagacctggaccgattccaacgctgcctgtatgagtaggggcgggcacttagtcaccttaaccagtgaaaaagaagaacaacaagttatctcgctagttgaatctaaaggaatagatttcgtgtggataggcgggtacacctcggaacgcgatgacggtatttttgcccactgggtaaccggagaaaaatggtcttatgacaactggttcccgggagaaccctcgcataccgatttagatggcgaaccagagttctatctaatgttgtggaagattcaaggccagtggtcgtggaacgatgaacgtgacgatctcttttcttcctcggaggctgtgaagaaaatgagtgggaagaccggttacgtttgtgagtacgaacagtaggaactctgggtaacaatggcgaaaaaatattcgcttcataacggtaattccggggccaaggggcgtctgctagtcaccgccatgctgcttgcggtaactctggtgatggtaagcgcctgtagcagcgccccggatccttccagggcgaagccgaaaaaatctactcccagtcccagcgccactaccttggtgtatgatccggttccagcgcaggccaaagctttggtagagaaaatgtctctagaagataaagtggcgcagatgtttatggtgaccccggaagcattcttacagcgcaaccagtgggtggttgctgctggggaaccggcgcagcaggcttttaataggcgaccggtggggggcgttatttataacagcgctaatctgcaatccccggagcaagtaaaaactatgctctctgaaatgcaagaatatagccaagagcgggtcgggctcccggtgtttattgcggtggatgaagagggcgggacagttgcccgggtcagtggcaatagcgcgctggggattaagccttatccgaatatgagcgaggtaggcgccgggaaagaccccaaacgcgccctagaaattggtaccgaaatggggaagtacttggccgatctgggttttaacattgattttgcgcccgatgcggatgtgctgacaaacccggaaaatgatttgcttaaagagcgcgcatttggctctaaagcccgtactgttaccaaaatggcggctgcttttagtaaaggtttgcagaccagcccggtgctagccacctataaacattttcccggtcacggttctaccagcactgactcccataaaggagtaactgtttcccagcaagatgtcaagcagctggaacgcgtagatttagtgccctttaaagatgcggtggcaaaagatataaaactggtgatggttagccatgtgtccttcccgaaggtggtgggggataacactcccgccagtttgtcgaaaaagttggtgaccggatgggcacgaggaaagctaaagtatcaagggattttgattactgattccatgaggatgggggcaatcagtagtaactatcagcctgctgaggcagcggtaatggcagtcgaggcaggtattgacatcgtgttggatccccaggatttcgaggctgcctatcaggcagtgctaacggcggttaacagcgggcagatcagcgaagaccggattaaccaatcagcaaccagaatcgtggccaccaagctgcggctaacatccgctaatgctgcaaagtaacggcggataatcagcaccaggtagcgcgcggaagcgcaggtagttagcagtagaaaaatttgagtgcaggacaaaactttcgcgggggttgggaaacatttcccaacccccgcgaggcatttatttagttattgatctaaaccagcacctagattttcacttgctccgaaagcggagtgtgattaccgaagcggtggttcgtaaaggctaccgcctgctcacgtacaaatggaatcatttctacgcgtccacaagcggtgaccggatgcgaccatactgccacgttcacattgccattgacagcttcgttaattgctttgacatccccaccaatcaggcggatacgagcatccagtccggcaccggctgcccaggcgggtagacggtcacggaaggattgatcggattcaacctcgtaatcgatgtgctgtactcgcaggtactgcaagagagcggagtcaggttcttgtggcatcgacaccgaaaccttggaaccagcggcgcgaccggcagctgccagcattagcacctgggaggcgtcctcgccctcggaaagccggatgagtaccggcagcggacggtaacgcaacacgttgcgctctacccgcagatcggaggggtcgtgcccgatagcaaactcggagtccagagcctgctgggaggagcgcagcgacgccatcacaaactctttattagagtccagagagcgtgccaccttagcggcctccaccagagcgcggttacgtagttccacgccctcattcgcaggaaccccgtcaacttcccattcgcccatgccgaataggtaggagggaccgcccgccttggtgcccgcaccaatcgcggagttcttccaaccgccgaagggctggcggcgcacgatagcgccggtgataccgcggttgacgtagacgttaccggcctgtacccgatctagccagaggttgatttcatcggcatccaaagagtgcaaaccggcggtcaaaccgtaatcggtcgcattttgaatctcgatggcctcttccagagtgtcacaccggataatacccagaatcggaccgaaatattcggtcaggtggtattcgctgcccggctgcacaccagcgcgaatacccggagtccagagctttccggaatcatctagctgcttgggctttagcgcccaatgctcgcccggtcccaaggtggttaggccgcggagcagcttgcctttggccggggtgcacagcgaaccggtctggctggaggggttggaggggtaatccacgattagggagcgtacgccgtcaagtagctggcgatgtaccctctcggaataacctaccgaaccgaccagaatcgccagcgaggaggcggagcacttttgcccacagtggccaaatgccgagttgataatatctttaaccgccagatccagatccgccgagggggtaacaataataccgttcttgccggaggtttccgccagcagacccatattgttgtcccaggagcggaacatcttggcagtgtcgatagaaccggtcaaaatgacccgatctactcgttcgtcagccatcaggttcttacccagatcccggttgcccagctgcacgaactgcagaacctcacgcggaactcccgcatcccacataatcttggctagtagcgcacctgtacgagcagcttctttagccggtttgaagattacggctgaaccggcagctagcgccgacacggtagaaccggtaggaatcgcaatcgggaagttccagggcggggtagaaactgttacccgcgctggcttgaacttggctccttcttgctgttctagctctaggcactgctgaccatagtagtggcagaagtccacggcctcagatacctcaatatcgccgccatctagggctttgccgcattcggcagctgcgatttccatcagctccgcgcgatgttcgctgagcccgatacctacgcggtgaataatctcggagcgttccttggcggggcgcgccgcccaaaccttggcagcggcctccgcacctgccagcatctgatctagtacgttggcatcggaaacggtggcctcttcgacctctttaatcccgatctggcaatcgggaatagccttaacaatctggcgagaccattcgatattttccggcaaggaaggatccgaatccggggtgttggcgaaagtccactccccgtccttttgtacgaaagatttaatatcgtcggcggtctcggtgagacgattttgctgacgtaccggaccaaccttgacatcgtagacccgatccagggcgcgacggaaacgttgttcttccttgtggagaacatccgcgtcatccagatcgaaaatatcggacatgaagttctgatccagcgagttttcttccaaccgccgcaccaagtaggcgatagccacgtcgtattcatccgggtttactaccggcacatagaacaggaggtgaccggtgtcctcggctactgccttggactggggagaagccataccggtaagcatctcgaactcgaccccaccggactctagcactccacgctcatgcgccagctcgaacgcaaaggccacggtaaacaggttcatgcctgctaccccgatcttaatgttccgggtgtgctctttggtgagggcgtagtccagtaccttcatgtagttggagtcggtgtcttgcttgctcttttgggtggtgagtttccagccgcgctcgcgagcatccacggtttccatcgagaggttcgcgccttttactacgcgaactttaatccgtccgcctccattggctacgcgcttagctgcccattcttgcaggtgcttcatagcggggagggcgtcgggcaggtaggcctgcagcacgatgccggcttccagtttttctaggccgggggtttccagaatcttcttgaacacatcaatggtcatatggaggtctttgtattcctccatatccaggttgatgaacttcttttgttcataggagttagcgcggcgatatagcggcaggagagcgtctacggctctatctaccacgtgatcatatgcccaggggttgtgcgggccggtaactgccgaaactttcaaagatacgtactctacatccggacgctccaacagctccatggtgtcagttagccgtttattggcttcctcgtcaccgagaattgcttcgcccagcaggttcatattgagccgcattccaccctgcttgagccgctcaatcgccggcccgagcttggcatcggatacgtctagcaccagatccccaaccagtttcgcgaacacggtacgggtaatggggattactaccttgggtagcaccggagctacggcgccgcccaatttgaagggtagacgcaggtaccaggggaggaaaccgacggaggaggaggcaaggcggttcatctcatccgccgcgacctgcaaatcctctggtcggataactccatcaacaaaggcaactgtaaagtccaaaccagcttggtcttctagtacctgggacaggagtttagctgcccgatcttccggatatttctcggactcccgtacccatttctgggcacgagcgaccgccagatccgcaaggtggcggcaatcgccggtttccccaccgactttggggggagccacgctttctgacatttgtttcagtcctttcttaggaaactgtgaataggtatcgatcgcacctaagggcgcagagagccgggcttggtatcgcccgaccctctacgcacttatattttcaaggtaacactagatgcgtgggagtgtaccccgattgcaaggacttttttcctagtccctttttttatttagttttcgtttaggaaatggcttaagctttgccctcaacctctgccaagggcacgacggttaccggggtaactttgcgtccttctaaagtagagttaatttcctcttgcgaggcatgagccaggttgacggcaagatcgaactcttcgtcgatttccttattcggcttgtaggtggcgcgagacaccagccaggagaccagcaggttcagtaagaacccgggtaggatctcgtacacctggaagaacatcggcacggtgtctggtagattgccccagataccaacggtaatagcacccacggccataccggatgcagctccctgccaggtgtacttgcgccagtagaggcttaataccaccaccggaccgaaagcagccccgaaacctgcccaggcaaaggccaccagacccagaatcgagtcggtacggaaccaggcaaagaaagcggcgataaccgaaatcgctaacaccaccatccggcccgcgttaatacctttggcacccaatagacgcttcttcttgataccgcggtaaatatcctcaaccactgcggaggaagttaccaatagctgtgaagaaacagtagacatgatggcggccaaaatcgcggccaacatgaacccggcgagcacggcggggaagagcttttcccccataaccaggtagatgctctcttgcgggttaactttcacccgagctagggcttctttaatgccaccgaggccattttcgacgagggcgcgcccgattagagcggtcaaagtagcgcctagcacacacaggaacatccagccgatgcccaggcggcgagccgccaccgcttctttgggggagcgcagcgccatatagcgcacaatcacgtggggcataccaacatatcccagcccccaggccagaccgttgagcatcgacaacttaccagcagcgccatcacctacgatcgagaacatatgaccttctaggccgttgagggtgccagtcataactccgaagccgcctagggcaactacgccgaagatcggcactagcagcagggcgataagcatcatgatgccctgtaccatatcggtccacgacaccgccaggaatccgcctaccagggtgtaaagaataactaccccggccacgattaccatgcctacgtggtagttaacaccgaagatggattcaaagaacacgcctccggaaaccatgccgctggccacgtagatggtgaagaagaaaagaataataatcccggctaccatctgcaggacatatttgttgtctttaaggcgtgccgacatgaacgaaggaacggtaatcgagtctccggctacctgcgaataggaacgcaggcggggggctacccatttccaggcacaccaggaaccaatcagcagcccgatggcaatccaggattccaccagaccggtcaggtaaagggcgcccggcagtcccatcattaaccatccagacatatccgcggcacccgccgaaagcgcggctaccagcggaggcaaggaacgtcctcccaccatgtaatcatccatggtttgcgtacgggtgtagccatagataccgatcaagatcatggctacgaagtaaataaccatggcaatcgcgataccgctagtactcccgctactaataaaatctgctgcacctacggtgggcaacactaatgttgagaatgtacttatcatttgctctccattgggataagtgccgaaactttcgactgcgcaacatactatctcgctgtcaagctaatcacaatatgacacgggactttagatatgtgagaggtggaagtctttttggctcgcctcgggtaaaatagcaggaaactctgggtttaaagaaccttttttcgagctagaagtttccccaaaagcctaggcctaaagacccggatgtttgtgatttaggtcgctgaaatcagcggcagaggggccgtgggcaggcatactgaaatagcggttagtacctatcttttaataaggaggtgttttctttacttggaggcgaagtaggcattactacaaattaggtatccaggtgaaactaggttcagtgccgaggataaaccagagcagtagctatcgcggccgcgccctccccacgtcccgtgaaccccagattgtccgaggtagtcgcagaaatcgacaccggcgcccccaccgcttcctcaagagctgctcgtgcctgctgataccgtgcccccattcgcgggcgattagcgatcacctgaacagcggcgtttcctagctcccatcctgcctggtgaataagctccattgtggccgccagtagctgttttccagaggctccccgccactcgggacggtcagtgccaaagtgggaacccaggtcaccttgaccggcagccgataaaattgcatcacaaagtgcgtgcgcggccacatccgcatcagagtgtccctttaagggtgtttcccctggccaggaaagtcccgccaccatgcaggggcgggaagccgtctccgggtcggcgggatcggcaaaagcgtgaacatcgctgccaatccctactcggggtaagaaagcaggcgcagaatcatctgcgctggcagcggggatatctaccgaagactctggaggcagctggttatgggaatcgctcatacctccagtttagcggggctccctgcccagaagcactaatacttgcctctcgggatggctaaatccgtcgctagggatctagacgaaatacttccaggtcaacgactcgcggctccgggtaatccgcaatatgtactagcagcattcccgcagtcttcaaataggggtcgttctggggtaataacctacctaatttgttaggagtgagcggagctagttccccaataatccccggtatggtggggcgatggacgcaaatcgccagcggcgcggcgggggcatctaagtgactttccgtaagtaatccgcgcacgaccgcgcgcatctgcgaaggatcatcgcgataggcgtcctcggtaaaggaggcctcggtctttaaaggcgtacccgacagcgtggcgtagggagccacagtggccacgcaacgccgccacggggaagtgattatctggttaatccccagagccgaaagtgccgggatcagccgcaacacttgggaggaaccccgtcgtgaaagcgggcgagtcatttcgccgttttcccaatgggagcgcttaatagcttttgcatggcgcaccaccgccagggtgcgagtgtataaggtgcgttctgccaagcgggtgagcagttcctcgagcagacgccggtcaccgcggcgagttagcatccgcatcgctttgcgcggccctacccattggcatttatcaatctctttggtagaagcgaggggagcgagggggcgagcccgcagagtttgtttggaaacatccgggaaacctacccagtagtgaacctctttggtgacccgcgcccccaggcggtacctctgcactgtcagtggtgcccctaaacgaatgggaaccccggtttcttcttcaacttcgcggactgccgttgccggtattgcttcacctggttcgcgttttcctttcggccaagaccagtcatcgtagcgaggtcgatgcacaatcaagacctgaatatcttgacgcttttcaggaaccatagtgccgggaatggggttagcttctggtcgcaaacgccatactaatgcgcctgcggaccgcactatccgcatatgcggtggcttaggtcgagccgtcatagtagccacttgcctttcttgtaatctgtttccattgtctaacaaattacctataaggtcattcctcgaggtcaccggggtgtcaattgctttaacggtacaaggtagcgaggaaaaatctgccctagcgtcccttcatccgcgaattggctttattaattaggtactcttggatgtccattagggcagagccgtctttggcctcaatatgacgccgccaagttccatcccggcgcaaatgccaagaggaaacctctggggaggcttcgagtttcaccaaatccatgagctccgcggtcatctcggcatctttaattaaaatcagcgcctccacccggcgatccaggttgcggtgcatcaggtcagcagagccgatccacacttccggctgtccggaattttcgaaagcataaatccgtgaatgctccaggaaacgtcccaaaatagagcgcacccggatattttcggataggccgcgcactccagaacgaatcgtgcaaatcccgcgaaccacaatatcgataggcacacctgcctggctggcgcggtagagggcatcggttactgcctcgtctaccagggagtttactttaatcccgatataggcgggcagacccttacggtgattatcgacctcgcgttcaatgcgttcgataatcccgggacggatagagcgcggtgccaccaataagcggtggaaggaggtacggggcgcataaccagaaagctgattaaacagacgagtaaggtcttgagctacctcgcggtcacaggtcagcaagccgagatcctcatatccgcgtgccgtcttggggtgatagttaccggtgcctacgtggcagtagcggcgcagaccatcggcttcttcccgcaccaccatcgacagtttgcagtgggttttcaaccccaccatcccatagaccacgtgtaccccagcgcgctctagtttgcgcgcccaagaaatgttggcgtcctcatcgaaacgggctttgatctctacaatcgccagcacctgtttcccgttttgtgccgcctcaattagggcagaaacaatcggagaatctgaggaagtgcggtaaagcgtctgctttatggaacgcactttcggatctttagcggcgtaggtgacgaaatgttgcaccgaggtcgagaaagaatcataggggtgatgcagcagcacatcgtggctacgaatcatcgcaaaaatatcggtgggtctggccgattccacttccgcaagcccggcggcggtggccggaacgaacttcttgtacttgagttccggcaaatccagttcgtgcagttcgttcaggcagcgcaggtcaataggttcggggagggcgaaaacatcctccatcccaatctctagtttggcaaccaggaagtccaggactggacgggaaatcccctctgccacctctaggcggactgccgggccgaaacggcgccgcaagagttcttgttccattgcggtcagcaggttctcggcgtcgtcctcttctacttccagatcttcgttgcgggtcaggcggaacacgtgatgctccaagatttccatccccgggaagaggtgatctaggtgcggaccgataacgtcctccatggtaacgaaagtggcttctcccttggtatctagcgcatcctccgggattacctggtctattgcctgttccacgcagatcagccggggcaggctttccgggatttttacccgcgcgaagtgctgttttccagttaggggattgcgcagcaccaccgccaggtttactgacagccccgaaatataggggaaggggtgcgaaggatcgactgccaggggggtgagaatggggaaaatttggcgccggaaatatccatgcaggaattcttgctgttcgggggcaagatcatcccagcggcgcagcttaatccccactttttctagttcgcctagcaaagtgttctgcacaaaaccggcttgccgggcacagagaacctgggcgcgttcagtcaccaggtcaagtacctggcggggggtgaggccggaggcggcggtgcgggcgattccggcagcaatccggcgtttaagcccggccacgcgcaccatatagaactcgtccaaattggaggagaaaatagtggtgaaccaagcgcgctccaaaatcgggagtcgctcatcttctgcctgctctaatacccgctggttaaactgcatccaggacagttcccgatccccaaaccgtcccttggggagaggtttatcttgaccgagggggccagcttgcgcgagtttgtcaatgccgggagcctcccgcaaagtggagggactgatggtggaaagatcttccggaccatcagtttgggcgtgaccaccgaaagtcttatcttcctgcgaggttttttcggttgatgaggaggtctttgacttcttagtggtcttttcgcgggtagctttggacccgcctgcctgatccttcacttttgttttcggggtggcagttttttctttggcgccgcctgctgttgagttttccttagcggctgctttcccgctatctttactggtagttttagcgtctttaccagatgttttgttcttagtgctcttatctgaagcaggggtggcagtttttttcggtcggggcaaaagctcatcgtctgaagctattttcttgccgtctacaaatggagaagcgcccgtaggcaggtcgtagtcggcgtcctcgtaatcggtaccgggaaactgttcgggagaggtttttgaagaaatcagctcatccgcagtcgcggtctcaaaattagattctgccgccacccgatctacctgcggggttggttcagtctgcggattttccttataaacccgggcgatatcggcaggagagggtactacgtgcgactggccggtcgcgtcctctttaattttggccttccccactttgggttctggcctgttctcagcgtcctgtttatgttccatgccgaccccttccaaaaataacggcagtgtttcttaaggaatattcctaaaggatttgtttctagtctaggcgatttgctttcgcggcacgtgctgaaagtttcaggtcgtccgcggtttgtagcagcgcttcgggacgtagagttaccggatccgccagttcgtcccgggcgtccttaatccattccgcgctcaccccgctggcaagtacctgcaggaaatcaccgatgcgatctagcagggaagccagctcagccatcgatgcctgcgcccgccacagggcagccagtttatccatgagggcggctaccgatttatcggagtgctcccgagaaaaaacatccccgatatctagggcggcaagtccctgctggaaacggttgttgaccagctgtggatcccgtaaataccactgatataccaggtagagccgccacagggtgcccggtaaagtgcccgccggagaggaggaccacagttcactgaccgtatctatcccgcctgattccagcagctgccgcaaacgctggacgttctcatcgctttctttttctatccccagcaacgtctgggctactaggtgagcgacttctgaggagctcgccccgtcctcggcaccgggaatattttctgcttgttcggcatccaacatcgctggcctgcgcggagccttccgtgtactcatttttcctcctttaatagccctattgtctctcagccacccttgcttgcgcgcggctttgccttgattggacagataagctcgcgcccgcacttcgcgctgctgacttggcctaaggttcgcccaggtgtttttcgcaggttccgcgccgctgtcttgcgatgcgctccatagtgtgagaccgctcaacaaaatgcaagataaagcgctttcctggctacaataggggaggtttgaggtgctaaaaatcggcgccgccaggttaataatgcaaaaggaaggattttagtgtctgaccgtccgcttagtgttgctgtgattggagccggtcctgccggaatctatgcctccgatattttgtccaagtctggtctcaatgtagaaattgacctatttgaacgcctgcctgcgccctatggcttggtgcgttacggggtggctccggatcacccccggattcgcgcgattatcactgccctttacaagattttgcagcgcggagatattcgtctgctggccaatgtgaatgttggtggcgaggacgctgatattaccgttgatgacctacatgaacactatgatgcgattattttcgccaccggttctgaccgggataaaccgattgatttgcctggccaggatttgccggaatgctatggggctgctgatttcgtttcctggtacgacggcaacccggactatccgcgtttttggccgctagaggcgaaagaggtggcagttatcggggtgggtaacgtcgccctggatatcgctcgggtaatggccaaacacccggcggatatgttaaaaactgaaatccccgaaaatgtggcgaaagaactctacaaatccccgatcacggatgtacatattttcgggcggcgcggacctgcccaagtgaagttcactcccttggagctgcgcgaactcggtcaacagccgggagtaaaagttattgtttccgaggaagatttcgagttcgacgaaggctcggaacaggcgattgcggcttcgaagcaaaccaaaatggtagtcgataccttaattaattacgcgatggacgaggacgatagcgaggctgaccgccgcatccacctgcatttattctcggctcccaaagagattttggccgatgaagacgggcacgtgcgcgccctagttacggaacgcactcagctgaacggggacggaacagtttccggtactggcgaactgcgggaaaccccggtacaggcggtttatcgcgcggtcgggtatttctcgtctccgattacggggctgcctttcgatgaggcgcgcggggtgattccgaataaggaaggacgggttaccgacctagagggaacccccttgaacggcatttacgctaccggttgggtaaagcgcggcccggtagggctgattggctctaccaagtcggatgcccagcaaactattgctcacctggtagaggacgcggaagccggcaggctagtggctaccgggaaagcggtaggtcacgatgccatgattaagctacttgagcagcgaggggtgcctttctccacctggcacggctgggagctactggacgaatatgaaaagcagttgggctcggacttcggtgaagttgagggtggccgcggagcgcgcgagcgggtcaaagtggtgtcccgtaaagctatgagcgcgatttcccgcggcgaggacgtgcctgaagatttaattggtaaggacggcgaatagccttctgtattgatgctgtggctggtggcggttagtagcctgccatttcctctaggcgtcgaatccgctgctccatcggcgggtgggtagaaaatagctgctgtacgccgcctgccctaaaggggttagcgatcatcatgaatccaactttttcggtttgcgggtttttcgccagcggtcgagcggtagttcccgcctccagtttcttgagggcgctggccagcgccaggggatcgcgggaaagttccgcgccggtttgatccgcatcgaactcacgggtacgagagatcgctagttgggtcaaggtggcagccagtggtgccaggaataccatcaaaagccctccgatagcccccaggggaccagaactttccccgtcacggcgtcctcctccgaaaaagaacatcatttgggcagcggaagtaatcaaacccccgatggcggcggcaaccgaggaggtcaaaatatcgcggttgtacacgtgcatcagttcgtgggagagtaccccgcgtaattcccgttcatttagcagctgcaaaatcccttcggtgcagcaaaccgccgcgttagaaggattcctgccggtagcaaaggcattcggggtagcggtaggggcaatatagaggcgcggcatcggttgtccggcggtttgggacagctcggtgacaatctttacgatttgtgggtattgcgcggggtctagcgggtaggcacccatggccttaattgccaacttgtccgagttccaataactataaaaggtcgaagccaatccgatggccgcaaaaatccatagaaatgcggaattattggtgccgtaggcaatcaggtacccgatccccaacagaatcgcccacatgattcccagtagcagcacggtctttataccgtttccaaaacgttttcccgccatatttcctccttgtagctcaaatctaacagtgcaagctgagcggtacctggcagcgagcttagctttctctattagcgattcctctatcgctcagcctggcgataccgaggtcaaatagccactggcggtgcttctgatcctgatggtgaatccgagagttgccgccccaatcagggaatacctaaaaaatatatagtgactaaatctctagtaatgaaagttttagcaggaattaggggctaaagaaatcggtaaattaataacggcacaatgaaagtaacggcgccctaacagattagtttcaattgattgaaacctgctttacctgcataatcataaaaaagagaccgaaaataaacccacaataacactcaactaaataattgaatatctatatgcatatattcaactgtattattgaatataaaaatttatttctataatgatcactaatacaaaaagttttgataggctagcgggtatgttagctaaaacatctgggggaaatagtgccccatctcctgtaaaacatgtcagtcacggtaaggctgttttcgtccttctgctcggtactttgtttttgtcgggtactccgctttgggtgaaagcatccaatatggatccggccactcaggcctggctccgcgtcatcctcgggttcttatgtctattgcccttgggcatcatggaaatccgaaagaagcagtcactgcctaagcaaggcatcatcctggccgtaatctcgggtctgttcctgggggtggacttcactgcctggaactactccatcttcctaatcggctccggggtggccgcaattctgcttaacctgcaggttgtaatcgtgcccatgctgactgcaattatcgacaagttccgcctgccccgttcattcgccttcgtattgcccatcatgattgtgggcgtgctctttaccggtggtgtttttgaaagtggcggcgaagcgtttgtcggccccaaaaccatcaccatgtttggaatggagctcaagaccgcagtcttaggtaccgccttcggtttgacctctggtatctgctattcgtgctatttgtacttctcgcggaaggccagtacttcggcgccgcgtaaggatctctacgtccagccgatgatgtacaccatgctggcgcaggcagtattccccaccatttggatgtttactggcggcaacggcttcaatatgacccagggcgttatgaccaagaacgccgagggggtaatggtgttgccgcagatggccgatggcattagcatgtccgaggcaaccctgatgggcgaccccattaatatgggtaactggattaacttgattatcctgattgtcatcggtcaggctgccgcttggaccatggttcaatatggttccgtatggatggatccgactttgtctgcgggcatcctgctcctgtcgccggtcacctcagttattattgccggtccgctgttctctgaatggccttctgccctgcagtggctaggtgtggttatgattctgggttgtgtggcctatcagaatggattgatacaaatagtcatctccaagataacgggcaaaccccttgctacggacgaatacactgaggagcccgaagatgtcgctcccgcagaaagcagagagtaatccgtaaaggtattggtcaagctgttttactcttaaatctttaaaagtgcttgccaaagtcatcacaacaaaatagatctagcgcaagggctaatgcaccttgcaacagctaaataaaatggaggattttcatgaaactcactcagcgtgagcaagaaaagctgcttatcgtcgtcgctgccgatgtcgcgcagcgacgcaaggatcgcggtgttaagctcaaccatcctgaggcggtcgctttgatttccgccgccattatggaaggtgctcgcgatggcaagaccgttgccgagttaatgagcgaatgtgtaaacattttgacccgcgatgacgtaatggaaggtgtccccgaaatgattcccgacgttcagttggaagttactttcccggatggcaccaaacttgtcaccgtacataatccgattcgctaactgaaagggaattaacaatcatgattccaggtgaatacttactacaagatgagccggtaaagcagaacgcagatcgtgaagcgattaccctcgaggtaaccaataccggtgaccgtcccgtgcaggttggctcccacttccacttcgcagaagctaatagtgagcttgattttgaccgcaaggctgctcttggcaagcgcctcgatattcccgctggcaccgcagtcaggctagaaccgggcgactcccgtacggtcaacctcgttgattttggcggaaagcgcgagatctacggcttcaatgggaaagttaacgcccaggttgactaggtgaataataaaagttattgagcagtaacagacctagcccgagtttaggtcaataaatacagacgaacttacgaaaataggagaagataatggcgtttgatatggcgcgacgctcgtacgtcgagctgaatggcccaacggtgggcgacggcgttcgacttgctgatactaacctgattgcccggattgagaaggactacctgactcccggtgaagaagtctcgttcggcggtggcaaagttattcgcgacggcatgggacaagatggccgttcggtttcagccgacgacgtggttgatctggtgattaccagtgcgacaattatcgactacaccggcatttacaaggctgatatcggcgtaaaagacggcaaaatctacaagattggacaggccggtaaccccgacacccaggacaatattgacatcaaagtcggcgtgggcaccgaggttatcggcggcgcaggcatgattgtcaccgccggtggggtcgatacccacattcactacatatcccccgaccagatagaagccgctctcgacaacggtattaccacccatatcggtggcggcaccggcccggtggattccaccaatgcgactacggttacggctggtcctaccaacctgcgacacatgattcaagcctcagagaactttccgattaacgtcggtttcctaggtaaagggcatgctggtggtccagaaccgctgcgtgaacaaatcttggccggagctgtgggtctaaagattcacgaggactggggcgcaactgcaaatgttattgaccaggctctaacggtagccgatgagatggatttccaggtggcaatccacacggacaccctgaatgagggcgggtttgccgacaacaccattgcggcattcaagaaccgggtcattcacactttccacactgagggcgccggcggtggccacgcccccgatattttgaaggttgcgggtctgccgaatgtgttgccggcttctactaacccgacgctgccctacaccattaacaccatggacgagcacctcgacatgattatggtgtgccaccacttgaacccggatcttccggaggacgtggctttcgctgattctcgtatccgtaaggaaaccattgcagcagaggatgtactgcacgatatgggcatcatgtcgattacttcctctgactcccaggccatgggtcgcgtgggtgaggttgtcacccgcacctggcaggttgcgcaccggatgaaggaacagttcggtccgctggctggcgattcggaaggcaatgataacgagcgcattaagcgttatgttgcgaagtacaccattaacccggcgattgctactggtgtcagccacgctgtcggttccgttgaggaaggcaagctagctgacctggttatttgggagccggcttactttggtgtgaagccgaagatggtgttgaagaacggctacgtcattcgctcggttatgggtgactgcaatgcctccattcccacccccgagcccaggaccatgcgttactcctacgcggcgcgtggcgtgctggcggctaagacttcggttaccttcttgccaaccgctgctatcaatgctggtttggaagaagagctacgtgccgatggcatgaaccggatgttcgtggaagcgaagaatatgcgtaatatttctaaggcagatatgaagcacaacaccgctaccccgaatattgaggttgatccgcagacctatgaggtacgggtagatggcaagctgattacttcggaaccagcttccgtgctgccaatgtctcagcgttacttcctcttctaataaataagtaagcctggctgggggatcgctaacttcggttggcgatcccccacattggcgctaaacggtggttaccagctacctttacattaatttactgctcgtcagagcgctgatttttgcggtttctctaaaacgtcaatgttctatcatccaattgaatggtggacatgtaaaatgctaacctggggtttcagggtcatgatgacgctgagaagatcgacagccgttatagccatcaattatcagtagagaaattggtgtgccctcaagtaagaaagaaatatatgactgtatctgaaattttaggtaacgttgccgaattgcctgcggcagatcgcgagaaactacaaattgattacgtagttttcgataatgaatctcgcctcaagagagttcagcgggctcgcactgaatccggtcgcgaaatccctatcaagtttaagccgggattccgggaaattaaagacggcgatattttaagtcgtgaaggcaatgcggtaatcgtcgccaagatggaaaccaccgatgtactggttatcaaaccgaagactatccgggaaatgggcgtcgtcgcgcacaccctgggaaatcgtcatatgcaagcgcagttctttgatgtagacagccaatttggggcgccagtaatggtggtgcgttacgaccacaccgttgaggactatctagatcacgtcaaagtagactatgaacgcggtgattacgtgatgcccgaagctttccgtcatgctgagcacacccactgatattcggcggaaactggtaacttggcaccttaccgattccgcactgcctactggaggatttgcccactccgctggtttagaaacttttgtacaagatgatcgggtggataacccggacagcttttcaaagtggttgcacggctacctgcgacaggcgagttttaatgacgcgttagctgtcaaatgtgcagtgcagttgtatcagcgcgaatccagccaggaaggtaaactggcagcacttcgagatttagacaccctgctgcacgcttgccaagcgccgaaacaggtacgtgcctccatgaattcgatgggtaagcgcatggctagaattgcctcctttatcgcccccgacgatttcctggtcagtcagtacgcagcggcaaccgaggcacaccagatgcatggtaaccccgggattgccgcgggcctcgctctagcggccacgggtattggtctagaagatgccatttccgcatatctaatgcagatggcgaactcgattacccaaaacgctatccgggctattcccctggggcaggatgcggggcagaaaattttagtcggcgcgtacccacttgtggtgaaggcaaccgaaatgaccttggatcatgatattagtgatcttggctgtgtggctccccaattggagattgcgcagatggcacatgaggatctgcggtcacgaatgttcatgtcatagcaaagtattttctatagtttagagacaatttttattttagagagaaggaaaaaatgagtgcaatcaaagttggcgttggcggtccggtaggatcgggtaaaactgcattaattgaaagagttacccgcgccctagacggcaaagtgtcaatggcggcaattaccaacgatatttacaccactgaggacgcgaaaattctggctcgtgatagcgtcctgccggaagaccggattattggggtagagactgggggttgcccccacaccgcgatccgcgaagatacttccatgaatgacgctgcctaccaggatttgattaagcgtaacccggatctggagttggtcttcatcgagtcgggtggcgataatctttccgctacgttcagcccggaactggtggacttttcgatttacatcattgacgttgcccagggtgaaaagattcctcggaaagcagggcaagggatgattaagtccgatcttttcgttatcaataagaccgatttggctccccatgtcggtgcggatctaaatgtaatggtcgaagattcgaaggtttttcgtaaagacaaacccttcgtattgacggatctgaaaacggacgagggtctagatggcgtcttggactggattcgccatgaagtactaatgcaggatctcgtctaatgcagattcccagcggagtctttattcataatccaccgcatgaagaaatcggggttttagaactaggggtggcagtcagcggcggaaagtcgattgccacccgccagttcaatacccgggcaatgaaaatcattcgcccgcattacctcgatgactccgggcaggtttattacattatcgctaatccgggcggcggttacctgggtggagatgcctatcgcatggatatcagcgttgcggagggcgcctcgctattgctgacagatcaatcagctaccaaggtgtaccgcaccccgggtgattttgcggtgcaaaatatccatttcacggtggaggatgacgcagtattcgagtatattccgaaccagttaattctgtatcggggagctgattttcgccagcacataaccgcgaatatctctgaaaagggttcgctgttcatggcggacatcatcactcccggctggtcaccggatggtagtctatttagctatgaacaggccagactccgcaatcagataactgttggcgaggaattggcgctggtagacaacttgcggattaatcccaccctagctgattttagtgacgataaagatttctttatggctgggcgaacccacgtggcaactgctatctgttttgaccccggggttgattcggacctaatagacgaggttaagacgctggtaaaggaacgttgtgcagctaaccccgatatgacgggtgcgcttagtgaatgtgaccgtcctggtttcatgttgcgagcattaggcagcagaactgaagaactacatagcctaatcctggcggcagcggatcacgtacggttgaagttgcgggggcaaggtccgatagatctgcgtcaatactgagtgctagttctggtgggtgacgcccatccagtgcagtagtttgtggatgtcatcgttagcgatggcgtatttgatactgcgcccctgccgggcagactttacgacaccgaccttttccatcgctcgtagcgaggcggacactgtggccatctgcaagttggtagcctcagctagctcggtgactgtataaacgtattgaccggcaaagtgaatagaagttagtagtttcagtctggtggggtcccctaaaattttaaatgtcggcgaccattcttgggccaacgtaagattttctgacagctgagccatagattttctcctagcctggttgcccaattcagttcgagctatttactgctttagggtaaaaagccttagttaaaaccctggcggccttgcaataatagattgcctaagccgccagggattaactattagttaatgattaaggtatcgagttggtagcacgctgagccagcgttaaccacttactcggtggcggttagcgctggttagagtcgttagcaaccagaaccgtcagcaccgtgcagagcacagtctgaataatggtgaaagcggtgttccaaccaacctgtccggtctggaagttatgggacgccgcaaagattcccattaatatagcgacgagagcaaagctcagaattacctgccgcgaacgtgacatttgatttcctccatgaaggtaatatacgaaatactattatctcgggttaaaggacaaaaagtttattgctccgagagtacggttcccttcttcccaatttcagcctaataggcatataggtaattataggtgatgaaaagcaagttttcccaatatcgacgattttgtggtagtaagagttgtcaacctatggggatagcgaaaatctttcgctgataattcgagataagtattcctattttatccgatgggcatcacccgatcagcgattttgtcgactagcaattgttcgtggctcaccgaaagtattccaatatttctccgcttggcttcctcgagcagaaagttccatatctgagcttgggaaatagggtcaagcatggtggtgatctcgtcagcgataagatacttaaggtcaacgcgcaaggctcgggcgatacaaaaacgttgaatttcaccacctgaaagttcgctggggtaacgattcagccagctgcgctcaatgccgagcccctccagcaggcgctcatcaatatcgccagcttcccgcaaactttcacccagttttagccgcgggtcaacagattgctccggatgctgccagattagctgtaccgggcgagcctggcgacgcggcaggggctggccaccgattagaacgctacctttttggggagttaaaaaaccggttagcaacttgcaaatagtggtttttccttggccactggggccgaatagggttactttttctcccggattaacctgcagattaaagtcttgtactaccggtttgtttttacggtactcaaaccaaatatgactagcgaccaggctcatttcccctcacctcccagggattcctctttataggcagcagggtttgcgcaccgcaccatggccttaccaatccgcagagaggcaatctcttcgttgcaagcatcgatcttccaggggcagcgggagctaaagggacagccagaatagcttccaggtaggggttggttcccaggatagggggcgaaaccgcgtcccggcaaggacctaagaagggcgcgagtgtaaggatggtaggggccgccagtcggcgtgctggtatcttgccactcttttatcaaaccaacctctagggtggtgccggcatagaaaaccgaagcccggtctgcgtagcgcagcgccaattccacgtcgtgagtgatgattagtaccgcatttcccgcgtccgcgaacttgcgtaaatcctgcattactagctccgctaactcagcatgtaagccgggtgtgggttcgtcagctacaatcaactgtggtttggctaggagagccgccgcgattagaactcggcgcgccattccccccgaaatctcaaatggaaacttgtcggcggtatcttgcggtaactggtagcgctcaaaaatgcgccgcatcgcttcgggatcgcatcccttttcgcccctgacttggcggccgatcttcattaggggatccaagctgtttacgctttggggaatcaaagcaacttccttgcccgccagagctgaaagcgtatcagcgctgagttttttcccgcggtattcgatatcaccggcaacgtaggcagcgggggagctaatccctaaaatcgcttcagccagcaggctcttacccgatccgctggagccgatgacggctagaatctcaccaggacgaacgcgggcgtgcagccgagaaatcacatttatgatttcaccgtctttagcggggaaaccgattgataaatcgtttattgccagtattggttgtttgctcattgtccgccccttaacaggacgcgcactgctcgtgcaaaggcgtcaaagattaagactacgaccagcaaagctacaccggggaaaattgccgaccaccacataccggcgccaatatatccaattgattcgctcaaaataaccccgatagcaggcgagtcggggggaaggccgaaacctaaaaacgtaatcgcagcttcgtgcataatcgcgtgggggaatagcaaaatcgcgcccaccatcgcttgcggagccaaggctcgccaatagtgggtagtggccagctgccaggggtttcgtcccaaggcttgtgcgctcgcgatgtaaatagattctttgacttgtagcacttccgagcgcactacccgggctaaggaaggccagtgggttacggccactccaatcgctactccccaaaaaccgcgtcctaaagcaatcgaaatcaaaatgagtagaagaaggtggggaatccccagcaccaggtcgattagccaggtaatgacggagtccacccaggaggggccgatagccgccagcacccctaaaatcaccgcgattagcgcgctgattaaggaagcgatgataccgataaggatggaggtagacagcccggcgaaggtacgggcgaaaatatcgcgtcccatccaatcggtaccgaataaattcttgaggtttggcgccaggccagtgcgggtgaaattggcggtggtggcggtatctctaagcgcgatcccaatacccactattactaccaaaaccgccaaagttagcactgcttgccgcatagccaccttggggttggctaaccgaggtaggttaggtagatggaaaatgtgtttatccgcaggaatgcttttgtttatagtctttttattattaactgatttagccacgctgaccccgccttattcgcggatctaccaccccatatagcaaggtggcgatggtattgccagtaaagactactgccgtggttattaccgatattccggctaagagggcggtatcggatcctaagcctgctgtaacggtggcttgacccagaccgggatagctaaatacttgttctaccagaattgagcccccgaaaacctcggctagcgaagcaaattgtaaggttatcgcgggtaaggagatattgcgtagtccatgacgccggacagcttgccacttggattccccgcgtgccttcgcatagaggaaaaagtctgagtccatgacgtctactagcttttgacgagtgtgcagcgtgatatttgcgatacttactacgcttagggttgctgctggcaggactgcgtgatttagggaatcccagatggtcacgtcagccgcatcaaccccaacgggagcagcgaaaccggaaggaaaccagcccagccagaccgcgaacagcatcaataccagcattcccagccaaaatgtgggtgtcgaagccagcccatagcagacggtggtgattatgcggtcaatgattttattccgtttagttccggcgattacccccagggtaaaaccgagaaccccagaaagcacccaggccgtagccaaaagtaaaaccgagttggaaaactttgtccagatgacttcggagacgggtgcgttataacgcaaagaaatacccatatccccttgcaggaaggcagtgaaccaggaggtgtagcgctcccatatcgggatgttctgaccccagtaggcacttaaattagcgcgctgctctgggctcatattttggacggcgaccgaaccgtagttagcctgtaccgggtcaataggcgaaagcgagattagccagaaaacaatcagcgatactcccagcatcaaaagtatgagcttgactatcgcaaccagcgaaaaacgcaagaaccacggaactttaggggaagaatcggctaggtgagccaccttctttggtggctcacctagcgattcagcggaatgttttacttccaagaccactgatccacgttgttaacgagagaccagccgtgaccgtgtgggtgtggtttttgatcggcgatctgcaaaccatcacgaacaaaatagaggtgatcaacgttagctaaccatacccaagaggcggcaccgtcaataccaggaccttccggacccacttgggctgcctggaattcgcggttagattcctcccggtcattggtagtaatcgccttcttcaggtgctcatctacggttttgttggagtagagcgagaagttgccccaaccctttgaatacagcacgttgtagacctcgcttggggagttggagccccaaccccaaagaatcggatcggagtagctaaggccgtaaatatcatcccaaggttttccgaccgggtttacctttacaccgatttccttcatctggttagcaaaatcagctgctatcgcctgtcgggttgagtcagaggaggggtaaatcaggttaaactctgcgcgtaacccgtctttgacaagaattccgtcagagccagccttccagccgtcatctgccaaaagcttcttagccttattgacatcagtcttgaaagcggctttgtcgctagaccagggcatgcgatccgatacgccgaacgctggggttccgtgccctttgagtacgttcttaaccatcttgtcgcggtcaaccgcgtagttcagcgctttccgaagcgccagattcgcggttacatcattaccagacttgtaatccttcgaactgtcattgaaggagttatcagcagggcggaaagtgccgccagcaggacttacaggcaatgaaatgccgcgagagtctacagtggcgtaacttgctaacttaaagccatcaactttttggccagcttttggcgcaaaaacgtaagcgacatccacgtcacccgcacgcgccgctgccagcgcgggatcctcatccataaaggtggcgattagcttcttcatcttcggtttttcgccgtaataatccgggttcgcagtaaagattgcctgctgtcccttatcccactgttttaggatgtaacgtccagacccgatgggcttggcgccataggaggggccgtagccagcttcgggtacaatacccagcacggcaagagtgtaaagcaaggtgttatttggctctttcatcttgatggtgacgttggtgtcatcatcagcgacggcttctttcacaccggttagttcgcagacagcaccgggatctttaagcatagtgttgatggtgaaggccacatcggaggctttcagtttggcaccattgctgaacttaacgtcatcgcgaatcttgaagtgccaagacattccatcgtcggccattttgtactcagtggccagatcgttgacaaagttcatgtctttatcggtattgaccagcgtagactgaatcagcggctcgtggacgtgaccaccgcagccccagcccttaatcgggtcgaagccggtttcaagctctgattctttagtcagagcgacccgtacttcatctttattttttccggaatcaccagaaccggcagaacctgccccggaggagcagccggcaagcaggagagccccggcgcctaacaccgccccaatcttcaagggggttaatttaagtcgtgaaaacatagaaacctcaaactttcatgaaaataatcaattgagtgattgaattatatcagagattcgagatgtgctgataattcggcgtaccttatgcctatttcacttgcagcggggttatgtggacgtaggagagagatttactgtcaactccattattacccccgagcggctcctcaccatcgccgctttaagtcaatcctgctcgcgtccgaaaactttagctaattactactggtcggctgcgtttagggcttcgatggggctggccttggcggcacgcctaccgggtagcaccgatgctaagaaacaaaagagttcggttaccagcaccactagccccacccagacccaagggatctgaagctcaatattcttttgcgagattatgccggcaaacggcatacattgcatcacgaaccaggagaagagcgtagatagagccacgcctaccaccagagcacctagcccgatcagggtgccttcaataatcaacatccgtcttatttgggtgcgagtcgcgcctactgcccgcagcaacgcattttcctgcgcgcgatcaaccaccgacaagctgagagtattggccacccctaccaaggcgacgatggcagaaatccccagtaggcacagcaggatcaacatcatcactcgcaaaaccatggtgacaatggaagaaatcattgcggagctttcgaagcttgccgattcaattttccagaactggttagtaaagtcttgaatcgtctggatcgtgtcgctggcgccccgcgacaaatcgaactttgcgattaccccataggtttgagcttttactccggaagcggttagctctttaaagtctgcctgggagagtactccgtagatggcgctgtaatcagcggggaaaccgctggcagtcttaggcatggctttcgccttgacggtcagtttcttgcccgttttgaaattaagattaactgggtctgataccggagcttctacctctcctaccagccacatttctccgggttgtggttgctggatacttttccgggtcaaggaattaacgttttctggcagggtgaccaacacgagcgagaagggacgcagactttccttctctgtgttttcctggttctctgtatccgcggattctgcgttttcatcaggattctctgttgaggcagcgctctccgcatccgcagatccggcgctttcaccagtatcttccgtccaggcaccgtcccctgcatcctcgggagaggtgcctgtcagctgctcctcggtgagcgcgctgccctgtgcgttcgtaatcgtgtccgcaactatgcccggcatttttccaacgttgctaacaccctcaacctgggaagctttctttatttcgttctgggtcaaagggatgctcgggttgggatataccagggaatagtcaaccgagaaacgccggttgatctcatcatttacggttttttgtaccgaggcggtaccaatcaaaatggtagacatcaaagtaacccctagcaccagggcagtggcggtcgctccggtgcgatgcggatcccttttcacgttttcaccagctagtttagcggtcgcatacttgcgggcaaacgggcgggtaaatagggcggtaaatgccggcaataggaaacggcaaatcattaaggccgcacacatcaggatgagggcgccagcgatggcggctcccaaagctatcgcctgttccgtcccgtcctcgctaccgcgattattccaggccaaaacccacattccgcccccggccactgccaggaatgcggtcagaatccagtggaaaatatgccgcttgggtttgcctttcttattaagctcctgggtattgagcgccgcaatcgggcggatcttcccgagtcccaaagtaggacgcaaagcaccaataagcggtactagaatccccgtagccaaagacaagaccaccgggaaaatcccggttacttccagggtttgcgacaaagagccaatcatgccggtgccgtagaccagggcaattgaccccaaccacccaatcagagtcccggttagcgcggaaactattcctaccagtagacattctaagaacgccgcccggcgtacctgcgcgacggtagcgcctacgcagcgcagcagcgcggtctctcgccttctcctagccagcaccacctgaaaagtaaccgaaacaatcccgatacagaccagcaccgccaggagcgggaaaaataagacgaccgcctgtaaggcgatttgttcggcattcccggcagtggtttcgctttgtttttgggttacggtaactaccgctaaatcctggctgagcagctgtttatcatttagatattgccccagctttcgggcgagcttcgccggatcctgctgagtgtgcaccaatatctggttaactcccatttcagtggcttgcgctagatgttttgccaggtctggggagaggtacacgtcaggaacctgaccgatatacatggaggcatcccggcgtacgatcccgctgaccgtaactttttgggttgtgggtttcgcgtccttgtcatcgtaggcgggtggaacctggatttcgatagtgtcgcccacgcccactccagttttctctaaatagctttctcccagggcaatctgatttttcccagtaggttctttaccttcgctaaggggagggcggtagaactgcggcgaaaatagccccacgccttgaatctgcacggatttgttcccgatggtagctccgacccaggtctgataaaccggctgtaattctaggtcggtcccattcgcctggcgaatcccggcgcggtcggccaggattgctggtagcgggtcctttttaatcttttcggcatccacggtgccatttacggggctcgtgaatcttcgtcaaaacttccgtaggtaattactacctgggtgttcttcatcatttgggtttcgccggcaccgatgacccaacccatcacggatccaaaagagctggcgagacaaataaaaatacagcagatgataatagcgcaggcagtagcaatatattgccgggcatgggctttcagattggctttagttaggaaacgcatttagatcacctgggaaagttgcccgcgagtggggtgagaaagttcttgagtgattttgccgtctttgacgattaacactcggtcggcgacggcggcggcactagggtcgtgggtaaccatcaccacggattgccccaggtcactggcggcgctgcgtagcagtttcagcacttcctgcgaggaggtcgaatccaagtttccggtgggctcgtcggccactagcagggcaggcttagtaatcagggcgcgcgcgactgccacccgctgctgctgtcccccggagagttcggagggcttatgggtgagccggtctttcaaatttaggatttcaataatctggttttcccaggtggcagaggtttgcttacctgccaatagctgggggagccggatattttccaaggcagtcagcgtaggcattaggttgaaagattgaaacacgaacccgatgtggtcacgccggaactgggtgagagtcttatcgttcattttggccaggtctttacctgctaccgtcaccgttcctttggtgacgctgtctagacccgccaaacaatgcaggagcgtagatttaccggagccggaaggacccacaatcgcggtgaactgtccgaaatagatttgcagatcgacaccgtcgagggcgcgcacctcggtttcgccctgccgatagattttataaacgtcattcagttttactaccggggatccttgcgcggcgctggagctactaggagcagcgctagtgtgcggctgcggcaccgcactgctgggtttttcgggcaatgaggaggtatccgcgcggtgacggagcggctgcgcgggatccgtttggggctcagcgatctgggtttctggtagttgcgtagccgcttgggatcctgatggtaccggctgagggggctcgggagtggcgagaggctgcggggaggccagagggggttgttgcgggctagctaccgccggtattggctgcacgctcggttgcggctgagcgaaagtcgggtttaccggctgcggagtttgggagatagccggattcgctgcctggtagctgttgacctgtggaggtagcggacttaccgcttggggaacaccggcctgcccgggaaggacgttgccggactggcgggccgggaaagccctctgcggtgccggctgaacttgaggtttaaccgctggcattcccgcagggggagctgcgggagcaggcggcgcggcatggcgcggcttttggtagcggtggaactcctcgggagttgctggctgatcgggctgattattattcaccggtttacctttcgttttctggcaaaaagtttgctgcgatttcactagagatttcagaagttttttgaagtttctttggataaagcagccggatggtagtgccgtacctgctgcttagattttaactgctggcgtttaaaatgcgggattatctcggtgtttttcactcgggtgagcgtcataaataccagggcttgcagagctaacaccccgatgatcatccaggtgagaggggctattgccgaggtgattatttcccaaatgcttatcggaggcgaaaaggtcatcgagatggcagagataaacagcaggagggcgcatccggcaagtagtaaaaacccaaaagcataaaccaggatcatttcccacatccgcgccctccaaataactgcaggtgggcaccctagttttagcaacagattggtttgcagttgctggcggcggttggaagccatcaccgtggtggccagggagaaggcggtaatcactgccactgcggccgcagtcaagagcaacccggttttcacgtcttgctgcactagctgcaacagtaagtaatgcagctgcaaagtcgcctgagactcactatctatgctgttagagcgagtttcaaggcttaaagagtcgctatagctgtctgctgccgccagaaaagctagggagagcagataggtggcggccagagaaagcaccggtgccaacgcaatccaaattcgggaggcatgcgcgcggatcgcgcgggcagccaaaagcactgcggggtagcgactaaaagttaaaggccaacaaatcaaggtcagcactttggcgggcagcgaaaacaccagcacccaaaggaaagccagcatcatgatgggcgctaaggctagtgccgataatccggcgatcaccattccagctagcagaatcggtattgccagcacgattaaccagaaaatagcggtgttacgggtggaacctttaaaccaggaggaaataaaagaaatattgaagcggcggcgggtttccgcgggaattccccgctgttggcgcaatagtagagtgattttccagatcgggatcagcaagagtacaaccagggacaggagcagaatccaccaagggggtagcaggtctttggcggtgggattaataccgagaatctggatattttcaaggagtggcaaagagagcgcgtaaactgcggcacccagcacaaatccggtaaaaatatagctataaatcgaatagcagctaaagaaaaaacgagttctggcgctcgctcccaagcgatacaaactgaccagagcatcccctaaacgctgctcatctagctccagacggttccaccacagcgcaatcagcggaaaggtgatcagcagagtggcgaaaacaaacaatgaaatatagatgacagacacggcctcgtgctcatagctacgggtatggctgggcaagacggcgagggcgcgccccaaagtatctgccccctgaggtaatatccataaacgcctgaccagaaaagcatgaatcccgccgagtacggctaacaggcagtaacaggtgatggcggccgatagtatcgagaccgcttgagcgggacgatccttaaaacctcgccctcgccagaagataataattcgtcccagagtcatttatgcgtcctcgacctgaaatacggtttctgaggtagattcgcgccgactgtcttgggcaattaatccatctcgcagggtgatgattcgccggcaccacgacgctacctgcggattaacggtagaaactaagagagtggcgcgggtgcgcgccgccgccagtgataacgcctgcatcgcttcttgccccgcaaccggatccagcagcgcagtgggttgatcagcaacaatcacctgggggcgggtcactaaagcgcgggcgatggctacccgcgcgtccaaggccgggctgagtgcggcagttaattgccggctaatttcttccaaccccagacgttgcaactctttcaaggcacgctgttttgcttctgcgcgtccaaaaccttgcaacagtagcggtaaagccacattttctactacttgcagttcgggaagcagttgttcggattggaaaataaaaccgaaacgctcccggcgcagcgcctgcaactgacgccgcgacatttctgataaatcccggccatctaagaacactgcccccgaggacggacgcacaatcccactgagcaaatacaggagggtggtttttccggcttgagtcggcccggtaatcgccacctgctcaccctcgccaatagttaaatcaatatcggctaacaccgtatgggagccgtagatcttggtaagcccctgggtttgaatcaacataacactatcttgacggttttcttagcgcgagaacagcgggtacaaactacttttaaggtagagctggcactaccctaaaggtagtcagcgggcggtgttctttaccgggagcgtcctcctaaaatataggtatgcagcgaactgatccctattttcgcggggtaacttaccaccgaagctccctggtacgttccagcctgaggctgggggtacctttcctagcgattgagctattttcgctggtggtacacgtgggggcaatgctggtgatgttccggcgctcgcggacggtactttcccactacacggcggcggtgcgttaccgcgcgagcgccatgctggggcggcaagatgctgctatctggcatttttggcaggttcccggcggggaaacgattctagaaagagatgatcatagtactgcggaatacataaattcccgttccatcccgattttcctgttttgcttgctggcaaatttggttgcctcttttccgttgctcaatttattgatcctggcccttacgaatctcctgggattcagaaacttcagtgaccagcgtgcatatctggcattgattatgttatggctgctgtttgcactggccagcggaatttacgcgcggttggtttttactattgccactaccggtccgttaagtgcggaggaaattgttcaattgcatcgctcgcgccgggaaatagtcgatgctttcgagattgaacgtcgccgtattgaacgggatctgcatgatggtgcccaacaatacctagtggcagcctccatgaaagtgggtgaggcggaactaaacctagaaatgctggcctcctcggaatcttcggaagaacctggggagtgtacggatggggaaggcgcgaataggaactactccgatgggggaagcacggaggattccggtacgcgcgcgcagatacaacagattttaggtttattgcgggaagcgcaagacgccaatgaccaagctttagcggcgctgcgacgtacagttgccggggtacatccgaaagtactttccgataaggggctggccgaggcagtacgcgatgtttgtgctgaatctcctttgaaagtggatgtccggatgccctttgagctgcccaagctgccgccgggagctgccgctgccgcctactacctggtatgtgagtccctcactaacgtggcaaaatatgcaccccaagccgaggtttcagtattggtggtagccggttcttccctggtagtttcgattaccgataatggagccggcggggcaagtattaaccccgggcatggcttggccggtttgcaggcgcgcctggaagccttcgggggaactttgcgggtaatttccccgaccggcggaccaactacggtgcgcggggagattccgattctagtatccgcgaaggagacagtatgaaaatcatcttggctgatgacgcaactttgatccgagaaggattagccgggctgctcgagcgcctaggacatcaagtaatcgcccaagccgaggacgcgcccggactgattgcggcggtgacacaggcgggtcaggctggtcagctcccggatgtgctggtaaccgatgtgcggatgcctcccggcatgagcgatgatggcttgcgcgccgcggtaaagattcgcgaagagtaccccgacctggggattatggtgcttagtcaatacgtggccccggcctacgcggcgcaactttttagcgccgatcagctgcccccacccggacaacacgcagctggtaccgggtatctgctgaaagagcgggtgtcgcgggttgccgatttcttgaacgctctgaaaaccgtggccagcggtggggtagtagtagatccggaagtagcagtgaaactggtgcgggaacgcggctccgccctcgccagcctcactgcccgggaaagcgaagtcttagggctaatggcgcaaggtttatccaatgaggaaatcgcgaagaaactattcctctctggtgcctcggtggcaaaacatatcgccaatgtgtttatgaaactgggactgactcccgatgaacccaaccgtcgggtgcgcgccgtcctcgcttatctaactgccaccggtttgcagtcctagtatttcccagtgtcctaccccggttaacgcgatgttaaaccatttttacttaagtagagtcagtaatagctcgcctagattaaccagaaagtgatagcaaaatggatatggataatcgagtctttgcgcatcgcggcttaaatgccttagcccctgaaaatacgatggccgcttttcggaaagtggtcgagcacggtctgaactggattgaaaccgatgttgatattttgggggatggaaccgtaatcatctgccatgacaccactttggatcgcaccaccaataaatccggcggttactacggactcactgccaccgatctggaatcgattgatgccggcagctggtttagccccgaatttgcaggcgagaagctccccaccctgcagcaactggtggactttatgaacgagaccgggttaaacgccaatattgaaattaaatccaatgaagcgggcgcgaccatgacccgtcagctaattcgcgcggtaatcaaagaactgggacggcttgacggtccggatgtgattgtttcctgctttaaccacgtattactatcggagtttcacgccttggcaccggagatcccgttagggtgcctatatgaaacctgctcgctgcatgatgattggcgctcggtgttagaactggtgggcgccagctatattcatcccgaagataccggattaacccgcgaaaaagtgcgagccttccgggatgccggattcggagtcaacgtgtggacggttaactccccggcgcgggccaatgaactatttaattggggtgcaaccggtattttcaccgatgtagcgcatttaattccccgccgctagttagcgtcggccgctacccacaccggctcgggttctagatttacgttgaacttggcttttactttttcttgtatcgcgcgcgctagctccacaatgtcgcgagaagtggcatgattgcggttggtaagcgccagaacgtgcttggaagaaagcgcagcccttaccgcgccctccgcttgatttgcagtggggagggcgaatcctttttccaatcccgcgtgcgaaattagccaggtggcagaggtttttatttgcccctctacttggggagcctcgccggtcaccgcgttgcgtaactgcagattaaacaccgggaaacgcggcgcctgaggaggaagctgctcggcatcctcggtcgaaataatcgggttagtaaagaaagaaccacacgaacgagtatccggatccgtggggtccagcaccatccctttggagcgccgcagctccaaaacggcctgacgcacctcgcgcatatcggcgcgttctcccagttttacccccaatttggcggccaactgatcatattcaatcggtgccgataaggaggcgtgcgccaactggaaatccgcagctagtaccacgtaacgtccggtataaccccaggttcgtccgcctccggcctcctcgtcatgcaaagaacgtttaataatcgaagtgcgatagccgagctgcaaatccccgactggtaaaatccggataccatcacgaagtcgatcgaaaacccgcaccgtagacagggtttcggcgacttcatgtccataggcgccaatattttgtaccggggctgcccccaccgtgccagggatacctgagagggcctctaaacccatctggtcttcatcaatacaggcgcatacgaactcatcccaggattgcccggctggtgcgctcactagagcgcccccgcaagcggtatcttcacttacggtcaccccactgcgcaggtcctggacaaccaccaggtcagataggtcttctccacaaagcagattggagcctccccccaggatcagcagtttctctccggaatggtcagcctcccgcactgctgctaccagctccgcctccgtgtctacctggtaaaacgctttcggtttccccccggtgccgatagtggtcatgtcctttaaaaccgggatttcatcgctcttatcactattttttgggtttacagctttccgataccaagcaggaaccggcctagtcggttgatggtcagcgtgaggggcaacccactcacaggagtcagtgaaatcggtttttaccatggttctattctagggcttcgctagcgcccacactccttcggcgatctccttatcgcaaatcaaatcggtgactaccccggcattaagagctcccagcagggattgagctttagctttaccagcaacaacgcaaaatcgacgagggatacgccgcaactgttccgggcttggtccggtggcacgtttatttatagcaatgtcactccaggagccatcaggcctgattagcacggtacacacatccccgaccactttatctagcgccaatttatttagttcactgcgcgtgaggtaaccggaggcatacacgtgggaggggatttcagcgtgcagcgctcccacgctaaacaccgccaaggtgcatttatgttgccagtttaggacacgctgcaccgcgccctcacgccaaagagcctctttagtggcggggtcatcgaaaaaggcgggtaccgggaactgcacgatattggctttccactggtaggccatgcgcgctaggattccccctacgtgtgcgatcccggaggtctccgtagaggctgcgccgtttagctgcaccaaagttacgttgtccacgtctttttgggtaatgtggccagccatctcggtggtggtggtcccccaggcgataccgactatatcgccgtcacttacaatctgccccaagatttgcgcagcggtttttgccacggtttccaagatacggttttgggtagtgtcggggggtagctccacgatatgcacattgactccaaagcgttcttgcagctggcgctctaggcgggtatgcggcatattcgtggtttgcaccgaaatagtcacgattccccgttttctcgcgtaggaaagcaggcgggaaactgtggagcgggaaactcccatccgtcgcctaatcgcctccatggtttgcccttgcacgtagtaggcgagggcggcgctgcgggccacttcgtcgcgtttactgctatattcgctgagatcagggtctaagtgctgttgattctttgacaaaaatctcacctccgcgcccagcggcgcacgtttgctctctacgttgaacattaatgctagagagcaaaaaatgaaagaagccattggaaaaagatggtaggcatcaaggacgtttgccacatcttaaccgtgacctacagaactgaatagatcccataaaatccaataacctagcgcaaaggagcgcgtatgttagcgacattgaatgatcttctggtaccgatggcggcagccaccccaagtagcggcgagatcttcgcgtcagaattctttggcaccgccatcttgttgatgttcggtgttggaacctgctgcaccaacaaccttttgaaatccaaaggtaaaggcggcggctggttaatgatcaactttgggtggggtttggcagtgtacatgggcgtgtatgccgcctataagaccggcggtcacctcaacccggcggtcaccctgatgaaagctgtctggcacggcatggacagcaaggtgactctgaatggccccagcgttgccgagggcggcattccggtaaccaccctaaacgtgtgcatctacattgtggcgcagctactgggtgcaatcgtcggggcggtgctcgcctacctgacctacaagaaacagtttgatcagccgatggaggatcctcgtcccaagctatggtgtttctccaccgcacccgaggtacgctcctacggctggaacctggtcaccgagattatcggcaccttcggtctgttggcgttcgttatggtttctggtggtacccccacgcaggtaggtccgctagcggtcgccctgtgtatcgtagttatcggtattgctttgggtggtcctaccggatacgccatcaaccatgttcgtgacttgggaccgcgtattgccttcagcttgcttccgatgaagggcggaaagccggatgctgactgggcttactcgtgggtacccttagttggccccacaatcgctgccattatcaccccgctgatcgtagtcggtctgggaatggccgcctaggaaaactgcttagagaaaataaatagaaagaaccctaaaggaagaaaaatatgaccgagaaaaaatatgtaatggccattgaccaggggactacctcctcgcgggcaattttgtttgaccatggcggacagattgtgtcggtgggacaaaaagaacacgaacagattttccccaaggccggttgggttgagcacaatccgattgagatctgggacaacattcgcgaatgtgttgctcacgccttgcagaaagcacaggtaaaccggcatgaaatcgcggcagtagggattaccaaccaacgcgaaaccgtagtggtgtgggacaagaacactggggaaccggtatataacgcgattgtttggcaggatactcgtacttcccaaattatccgggaactcgcgggcgatgacggcccctccaagtatcgcgatatttgcggactcgatttgtcgacatattattccggaccggaaattaagtggatcctagacaatgttgagggcgcacgtgagaaggcagaagccggtgaactgctgtttggtaacactgactgctgggtactttggaatatgactggcggcgtgaacggcggggtacacaagactgatgtcaccaacgcttcgcgtaccatgttgatggatatttgcaccctgcagtggcgcgaagacatttgcaaagactttgggattcccctgtcgatgctgcctgaaatttgctcctcctccgaggtttacggctatggccgtaagaacggtctgctgatcgacaccccaatttcgggtattttgggcgaccagcaggcagctaccttcggacaggcttgcttcaagaagggcatggccaagaatacctatggtactggctgtttcgtgctgatgaatactggggaagaaccggtgttctccaacaacggcctgctgactactgtggcttacaagatcggtgataataagccggtttacgccctggagggctcgatcgcggttgctggctcgctggtgcagtggctgcgtgacaacctggggttgattaagacctcggatgagatcgagaagctggctagcaccgttgacgataatggcggcgtgtactttgtgcccgcgttctccggtttattcgcgccctattggaaggacgatgcccggggtgcgattgtcggtctgactcgctataacaacaagggacacattgcgcgcgcggtgcaggaagctaccccctatcaaacccgcgaggtcttcgatgccatggtggcggactcgggcgtggagctcaaagagctgcgcgttgatggtggcatgaccaaggatgaaatggttatgcagttccaagccgatcagctgggcgtgccgctggtacggccgcaggtgctggaaaccaccgcgttgggtgcggcctatgctgccggtatcgccgtgggattctgggacggcgaacaggacgtgatcgataactgggcagaaggcaaacgctggcagccgggtgaggatcgcgaagaatatgaccgcaactaccgtctatggaagaaagcggttacgcgcaccttcgagtgggtagacgccgatgtagagaacgcctaatcacgttcacaaaacataactgatatagcaataaacatcccgggagggtggacttactatccagcctcccgggatattcttatctatgtagatgacgcagaaagatgtggttaaagaaccaaaagaactgctacatcaccaccaggcggtatcccatgccgcgtacggtcacgattcgttccgaaccaatcttgcggcgcagataacgcacatatacatccaccacattcgaacccggatcaaagtcgtatccccacaccatatccagcagctgggaacgggaaagtacctgatcgggatgctccataaaggcttgtagcatagtgaactcgcgggctgatagttctaccggctctccattaatggtggcgcagcgagtacgcaaatccaggtgtaggccacctacattaatctgcaccatattggagggatcttcattactggcgttctttagccgtagccggatccgcgctagcagttcctcaaagcggaaaggcttagacatatagtcatcggctccctgctccagaccgctcacggtgtcctccaccgaagaacgtgcagtcagcacaataatcggcagggtggctccttgaccacgaatctgttctagcacttcgaagccatccatgtcgggcaggccaatatcgaggacaatcagcgagtaatcgcccccaagagccccggagatcgcgtccgtacccttgtcgactacggttacgttatatccggcggaagttaatcctttagcgacgaaagaggagataccgggttcgtcctctaccaccaagatgcttgtcattttttattctccttgtatttcatctttgcagtcatcatctgaaatcggcaggctgatattaaagaccgatcccactgaaagagcggagcggacttgtaagattccgccatgcgcctgtgcaatggcgttcacgattgataatcccaggccagacccggcataggagtggtcaacccgcatgaagcggccgaaaacttgttcctgatccttcgggtcgatcccgattccctggtcacgcacccacagattgaggcgatgggtacctgacaccagaggaacttgcggctgcgtctgcaggctgggagcggtaacagtttcagccgctacctgattaccgtgcgaatctaagaggggttgctgataatcgattcccgcacccagggcaataaccgttccgggagtagcgaactttgaagcattttgggcgagggcgagcagcgcctgttgcaggcgctgatgatccgcggtggtctttacgatagtgaggttatcgattcgccagttgaaatcacccagttgggtagcgttttcaaacgcatccatgagtaaatccccgatatctacccgttcgggccggatgaagtcagggcggtcgctcttggcaaccgtaatcaagtcttcggttagccgatgcatccgggaaagttcctctaacgccagctcccgagtccggtaagtgtcttggggatcattgggatccaaaagctctaggtgtccgcgaaccaccgttatcggggtgcgtagctcatgacccacatcgtttagcaggtcgcgctgttcatcaaaactggattgcagacgcgcaatcatcgagttcatctgacgggtaacatctgccaggtcatcattgccttctactggtaggcgcttagtaagatcttgttcgctggtaatcgaagtcatcatttcccgcagccgggcaatcggcgccaacaatgactgcgaggtgcgaacattgaccagtcctaccagcgctaatactaagaaagaaattcccgcgaacagtagtagctgtgtctgggtaggggcaatatcggcggaatagttagaaaccaccgccagcagggcgtcatcagtacccgcggcgctaatcggtacgattcctaccgcataggtggcctggtcggtgcgcaccataaacattttcgccgaactcaaatctgcgtagctggttatctgcgccaacagctgtgtatcttgatgagcggcagaatctcgcgcgtctttatgtgcggtgagctcccctcctgaaaagcccagtaaactgccgttatagggggcgtccgcagcgtttatgaacttaaccaaagcatctttggctgaaactagacctccgctggatttaccgttctcaacctcagtaaagttccgcaaatcagcagtgatggcttcggtttgcgcccgctccgcataggaaatctgaaacatcccgctaattagcaaaataaatcccactacggtcagtgccaacgctgaaatgagtaccgtgtgcaccagcattcggttacgcaagttagaaatccgcagcttatgggctttatcttgggtagtaactgttttttctattacccgccgcggacgagcttgataggccgcgcgctctgcgggtgcttgcggagcgcctgcctttggctgcaagctttgcggtgcagacgttggtgcagttccgccagtaccttccaggatttgcggcaaggtcatctccccaggtatctgcacttcggggacgggagcagcagccgggatcggggagagagctgcccgaggacgagcggcgggagccggcggtgttaccgatgaggaagcagacccgccgggaaagctagcgccggggtagctaagtttttcggtcatggctgctccactccctcgggagtgggagaaaccgattctaccggtggcgcttgttgagtgatggccggtgcttgcggctggaaactaaccgctggacctaactcgtgaactccatttagtagcagggcgcgcatcccgattagaatagccagagccagggcgataacgacgattgctaccattgcaaacttgcgcatgccgagaccctccttgctaatcccagaatctttaaggacgcgctcacgtcctttctaatgattataggttatagaaaggatactaaggacaacctattttacttgattaagaaaatcgactatccgacccacgccttcttccaggtcgtgatcactgagcgcgtaagaaagacggaagaaaccggaaggaccgaatgcctcgccgggaactaccgctacctcaaccttccgtagcatcaaatcagccaactctgccgaagtttgcggggtttcacccgcgagttcgcgccctaaaatccgctctacgctggggtaacagtaaaaagcgccgtggggcataggaacttccaggtcaggaacctgacggagtagctccaccatccgttggcgacgacgatcaaacacttcgcgcatttccacaactttgtccaaggggccgctgactgccgctagggcagcccgttgcgcaacatttgatacgtttccggtggtgtgggactggaaagcagcgcaggccttgattacatccttgggagcaatcatccagcccacgcgccaaccggtcatagcgtaggtcttagccaccccattcaacaccagggtgcgttcagctagttccggtaccagtttcaaaatatgttcagcgtgtataccgtcataaatcaggtgttcatagatttcgtcggtaatcacccagatctgattttcgagagcccactgtccaatagcttttagctcatccgcgtcgtaaaccgcacccgtgggattggacgggctgaccaccagcagtgccttggtcttgtcagtcttggcggcatccaactgttcaactgtgactttatagtgctgatccgctccggccattaccggaactgggacgccgcccgcaatcttgataacctccgggtaggtagtccagtagggggtgggcatgaggacttcgtcgcccacctctactaccgcggaaaacgcctcaaaaacagcctgtttaccaccgttggtaacaataatttcggtgttgggatcaacttcgtagccggaatcgcgcaaggtctttttggcgatcgcctcgcgcagctggggtagtccctttcccaggctgtagtggtgcattgccgggtcggcgcaggcttcttgcgcagccttcacaatatagtcaggggtagcaaaatcgggttcccccgcgccgaatccgatgaccggacgcccttgagctttaagttctttcgcggcggcatccacagccaaagtcgcggaaggagaaatttgggctagacgattcgaaattctgtgttcttgcggtttattcatacccctattttgccacgcttgtctgttgaatcaccagcgagaccaaaatgcaatagttatttatagctagttctactttgtagactgccgtttcactgtgcaaaataggtaaaaggatgcgtttttccccactaagcacctattttggttggacgccatccgcaaaacctcataaacttatctagcaccgtataaggtcagccattaggctggaagggcagtggcgcaattggtagcgcaacggtctccaaaaccgtaggttgtgggttcgaatcccgcctgccctgcaaatctgaaacctgtgccgggcccggtacaggacgaaatagggacttcgacgggagtcccaagacagcaagtgaggaaacgatcttggcacctaacgaaggcgcagcctccgcagaggcagacgccaaaacggcgaaaagtggtttttggggtcgcatcgtgcagttcgtgcggcaggttatcgcggaattaaagaaggttgtttggcctacccgcgatgagctcactacgttctttgtggtcgtgatcgtatttgtgctggcaatgatggccttttcgggggttgtcgacgtaattaccgcctgggtagtcagcaaagtattcggcggttaacttaaggaataacatttgcaagcaggcaataaggagcaggaagaaaataccgtgagcaacgatcccgtattctcctcggaggaaggcgcctccactggcgcgaacccgcagtcccaagaggacgtgcagggtagcgtagacgcagttgcgccctcagaaacagcagcagaacaggaggctgtcgccccggaagcctccgcggtgcaagaagacgcccctgaacttgagattaccgacaccgcgcaagaccaagagcttgcgccctcggccaccgcggaagagctttctaaggccgaacaagacaagctgcgcgaggaactagagtttctccccgggtattggtacgttctgcacacctattccggctatgagcggcgagtaaaagccaatctggaacagcggattgtcaccttcaatatggaagaccagatctaccagattgaagtgccgatggaaaaagtcgtccaggtaaaatccaccgagcgcaaagtggtcgatcgggtacggattcccggttacgccctggtacgcatggaggcagtcgaggatgcccccgatgcctggcgggtagttaaggacactccggcggtcaccggattcgtgggagattcgcaacacccgatgccgctaaccgaagacgaagtggtttccatgttggcacctactccggcctcgattaaggctgccgagctgcaagacgaacgttccagcaaggctaaggccgtggaacagccggttattgaggtggatttcgaggtcggcgagaacgttaccgtcaccgatggccccttcgctacgatgccggctactatctctgagattatgcctgaacagcagaaacttaaggtactggtggttatttttgatcgggagactccggtagagctcggatttaaccaggtagcaaagatttaattgctcacagtgagcagtcctaattggttgtaagggcgggtgcgcccttagaatggacgattgtgctgggagtttttctgcggaaaaattaccagaccaccaagagtttccggcaaccgccgggaaagtaaaatcaagaaattatattgagaaggaccctatatgcctgcaaagaagaaaaaggtaatcggcctgatcaaattacagatcgaggccggtgctgcaaacccggcgcccccggtggggcccgcgctttcgcagcaccaggtaaatattatggagttctgcaaggcctacaatgcggctacgcaggatcagcgcggaaatgtgattccggtagaaatcagtgtctacgaggatcactcctttgactttgttctcaagtccccgccggctgcccagttgattaagaaagctgctgggattgccaagggctctggtacgccgaacaccaataaggtggcgaagctgaccatggatcaggttaaagagattgccgagcagaagaaggacgatctgaacgcgaacgatatcgatgcggcagcaaagattatcgcgggaacggctcgttctatgggagttgtcgtcgagggttaaccctgcggccactcaaaataagactataaaccgtggaggggaacgtgcgccctcaccacaacctgcaaggagaaaagcagatgaaaaagcactctaaggcctttaaacaggctgctgaaaaagttcataaggatcgtctctatcaaccgttagaggccttccgcttggccaaggaaattgcttccaccaagttcgattccaccgtggatgcggttttccgtctcacggtagatccgcggaaatcggatcagatgattcgcggcaccgtttctttgccgaatggcactggtaagaccgttagggtcctggtttttgccaatagccccaaggacaaggaagctttagacgcgggagccgacgaggccggcggcgatgagctgatcgaaaaagttcagggtggatacctggactttgatgtagcggtagctaccccggacatgatgggtaaagtaggacgcctaggtcgcgttctggggccgcgtggtcttatgcctaacccgcgtaccggtaccgtcactatggacgtagccaaagcggttaaagagatcaagggcggccgtattgacttccgggtcgataagcacgctaatctgcacgtggtgctcggtaagagctcctttgatgccgagaagctggcggagaactaccaggcagttctggatgaaattctgcgtttgcgtccggcagccctaaaaggtctgtacatcaagaagatcgcgatttctacctctatggggccgtccattcctttggatagctcgctgactaaggatctagcgactggcgatcctcgctaaggattgccgcacccgcctctgggcgtggtgtaaatagctgaaaatctaaggggatcccgccggtggaaaaaatccaccggcgggatccttttttgctttccgggtaaattcaaatatttgcttatataaggggcgcggccggtaaaagatacgacagggacacgcaatccgccagtatcttgcttagtcggaaacatacctatttgcctcttcttacaacttcctatcctcgcctaagcgaggaaatcagggtccccggagtgcttttaccgagccagcccctggacgcagggtaagaataatcgctaaaaggcactccgccggcgccctagatcataatggctgtggcaatctgattatcgatgctgtagcggctgtctataatcactacgatgcacattttgcgtttgcgggaaatgaccgtgatttcctgaccgctgtagcaccccagacgaaacaggaaactgtccatctctgggtcgtcagtgtctatatcttgcacgatataggtttgaccctcggtggcttccagaagattcattctttcctttgtgtcgtaagttggctttgtctcgcaagctagtgaccgcggcagctgccagctgccaggtgccaaagcctagcgggattagcaaaatcgagaagggggtagcaatcgaggccaagatagaggtgttttccgcgccgtctggcacttcttggaaactccaattaaaagtctgcatcagctgtactaccaggttgcataccaagatgatggtggcggctttaataatgtaggctttggcgcgctctaacatcgacaaggtggcgtgccacagggaaggcacccggtagcggggtagctccatgatgaaaaaagttttccgaaacttgtgtccggttaccatcttcactagcagcgcccccaggaagatcaggcacagtcccaggaagtagctaacccaactcacccaggcagatccggcgaagaacgctccacagaagagggcaatcaccgggatttttgccccgcaaggaataaaagaagccagcatggcggtggcgcgccgttcgcgttcatcacggatagtccggcagctcataaagccgcaaaatggctatgcctgcgaatttattggttagtaccgcatccagggtgtcttggcgagtgtgagcagcaacttttaccgcccgtttttctaccgtgtcaactatcgagtccacaaactcgtagcgacgccgatcttccttatcgactgcctgtttatcggtgagatcgatatctgcctgtagatagggggctttttgacctttcccttcctgcgtgaaaacttcttgcaagacctgatctaagccgttgttttccttcgcagtggaaacggtgggtaccaccggacaacccaattcgccctgaagtttttggacatcaatctgggtgtcttccttttcgttgatatcgctcttattaagggcgactaccaccggaacccctagctctagcagctgggtggtaaagaatagggagcggcgcagattggtggcgtcaacgatattaacgatagcgtccgggttggcgtcatgaacgtatttactggtgatagtttcctcgggagtgaaaggagacatggagtaggctcccggcaggtccacggcaatggcttcccgaccgtcagtaagctcatttttttagcttagcatcagcttgtccaatggtaactccaccccagttgcctaccttgactttctttccggtaagagcattaaacatagtggtcttaccgctattggggttgccagcaaaggcaattctcatgacgcaatcctctcaaacatccgtaggcattaatggtaaaatttacgtttacctaagtaatggcactactcattgaaaggaaaaccttactaggacataaatccgggctaatgcctatttgggtattaacccgtaaatccgggatgtttgctccactacttggtagatgaaagcggggtaggaaccactacttagtcatgaactatttgctagagccgaaggctagcagcaagaattagactgttatttttctaaatcttccagggaagtattttgctcgggaatagtcaaagccacgcaggtaagtttgcgttcagccttatctttccagctggtttcggtaggggagagggggtacaaatcccacttcgaatcgcggtaactgattcccacaaagtttttgaagtcacgcgcacactgtttaagcgctaaatcatagagttgcttttgccccgggaaggttgctcccgttaacttttttatccctactacctgagagttatgcgctcgcgaacaatcgacccgttcaacttgcccggcgggctgcgtgccagttaacacttcatcaggcatattaaaacagtcgccaacttccagagcggaggtcgcaatcggttgcgaggaacagccacttaacgcgcctagggtaagggtagctaggacgcaggaaaaggcgaggcgcgccctcagacgggggaaagaaaccgcagtcattgcttccacgctaacctctaataggggaagatcgcgtgaaccaagaaataactgagcgctccaatcagacccgcacccggcaaggttaaaatccaggcaatcgcgatatttccggcaactccccaacgcactgcggaaaggcgcttggtagcacctacccccataatcgcggaggaaaccgactgagtagtagaaattggagcgtgccaaaggaacgcagtgatatagagaatcgaggcggaagtagcttcggctacaaagccgtgagctggggtcacgtcaataactttcgagcccagagtgtgcataatccgtccgccgccgaaataggtgcctacggaaatcgcgccggcagcagccagttttacccataagggaatctgcatagaaccatcagcgtcagtggcgtgatagccggcagccagcagcgccatagtaataatccccatggtcttttgggcatcctgcaggccgtgccccagcgccatcgctgccgccgagaaacgctgcaggaagcggaagttattcatcgtgcgatgataggacgctctttgcagagcagaaagtaagaagcgcattacgaaataggcggtgaaaaagcctagtaacggggacaccaccatgggaatcagcacgtgactgacgattcccatccattgcaccgtgatggtagcagccaagcctactcccgccataccgccgatcagggcgtgggaggaagatgagggcaggccaaagtaccaggtaatgatgttccagataatcgcccccaccagggcagccagaattatcactaacccgtgctggcgttctgccatcgagacggagtcggtgaaatgggaaatatcaataatcccattaccgatcgtttgcgccaccccagtacccagcatcgccccaatcacgttcatgactgctgccattaacagggcggattttgggcgcatggagcgggtagaaacacaggtggcgatggcgttggcggcatcgtgaaagccgttggtaaagtcgaagatcaacgcaatggtgactaccgcgatcaccagggccagggtggtgtccacgggttatgactccttgatgtagatggcctcgaccgcgttagctaaggtttcaaaggagtcgcaggcggtttctaaagactcgatcacgtctttaattttgatgacgtaaatcggatcagtttccgaggtgaaaacctctgccagcatcttccggtactgcttgtcgcccttgttctccaggctgttgatatgcaccgtaaagtctttgaggtcgcgcccgccccgcagtttcgggatggcggtcgcggtttccttggcgcactcccgcaagatttttgcctgtttttccagccgtcggggaatatcttgaatttcgtagaggacgattaaatcccccgcttcgtcaatcccgtccatgcaatcatctaacgcgccggttagcagggagatatcctcccgatccatgggggtaacaaaggtggcgttcagcatactcatggtgcggtgagtaattacgtccgagtcatgctctaaatcgtggagctgggcacgcagctccttgcgttcctcgaaagagtcaacctgagtaatttttagcaatagttcggaggcggcatctacgttttttgccgccttagtgaacaggtcgaagaaatcttctgttttccgtttctttttgaacagcatcggtgcctccttggcgaagaactatccgttccaaggttatccaacttttgttcgtaatctaaaattccttactgatttattttggtggagaaaaagtccgcgcttatctgcgaaaatagcgcgctttgcctccaagggacataggactttggtaccgcagccgggtgagggcgtctgtgctgtaaaatcccagttaccggcgggattgctcctagagcttatgtggcatttccgaggacggactatcgccctaaaactgagtgtacgggtactactttttcgtagctagggcgcttggggttgtagcagaaagcgctccctaaaaatggcagtcgtagcatcagcggggatcaagagtggtagagaggggataaaaacgccggaccgagaagcgccagtcggcgctgaggccgctcgtagcggcaatttttggagcccggggctaaacggcccgacgcccttatagtctagcgaaacccgccaacccttgcatctaacgcggttaggggagggggagcgggaaccttgggggcgaaccgggtaactctctttgccctgagagcaccgatatagcgataatgggaaagtgattaacactgcccgaaaatatcgtttgcgccgactagcggcactggtgatattggctatattgctggcagtaatcgccctggtggcgaacctgatctatgggtttgttaagcaagaaaaatctgatgtttttactcccgaacccactatgccgccggtcagcgcggagggtttcgatgccgccaatttaatcagcgagacggagtttactcgctgggattctctgtctgcccggcaaattcaggactttattaccgattggggatatgggtgccgccccggaaaagcaaaagagatgccagagaataccggcatttctaaggcgactagcggcagcgacaaacagcaggtagcggtgccttgtctcaaagattttcgaggacggttagcccctcacgatgccgatcgctactgcccgcaggcagtgcagggcggcgaggaacttaatgcgggagaaatcattgcccaggtttctcgcagttgccagatcaacccgaaagttattttggtgactctgcaaaaggaacaggggctgattaccgtctcctccgcgcgtctaacccccacccgctatcaaatcgcgatggggtatgcctgcccggatcacaagctttgcgaccggcaatttttcgggtttggtacccaggtttactacggggcgcgccagttgcgccgctaccaggcggatccgcaagaatacctagtgcaggcaggaaaaccggtaactttagggttcggcccggattcacgctgtaacagtggagaaatcaccgcccaaaactggccgacggccgccctctacaactacaccccctatttggcctctgaggacgcgctcgcggggctgagccatgagtgtgcgcaggcggggaatctaaatttctataagttctacaaagcctggtttggcgatcccgttaccggcaatggggaagtgcttacccgcaaagccttgaagcagcgtcaggcgcagcaaaaagtaaaatccacaaattagcagtggaattttattaaattattcagtatttatgcaggaaaatgctacaattggtgcgagcgtttgcaagttgacgctcttgcgggacgtttttgggaggtgtcctgcgctcaggggaggatgccaggtattttcccctaactcggatccctaccgagagttgttagggacttgggggctcaggcaagatgcctgagcccccaagtaattcccctcccacccttgaatgcctcttgtcggtgtgtttcccggttccgggctaccgctggctctctaggtaacgcgcggaggccatattcatcctctcgcccaaaaactcgaaaaaagccagggcctttttcgagttttacgcccgcctagccggatcggacaaatatagcctccgcgctcactggggttgcgcgcaagggttgcgattttgagatgcggggaaaagttttatccgagtgggtgcggtgggcataagaattcggaaaacgccgctacgttttccgaattcttgggcgggaggaaaaacttttccccgcatgtaaccgcatacacccgtgcgtagcagcaccgattaagacttggagaactcttgctttgagtaagtcaggcagtggggtcgggattttttagggcggataggggagcatttagaactagcgcttgcaggtagaggacgaatccgaagccgaacagaggcattaagattatggcactccagaaaagactgggacgcaggtagagggcaactaggggcaggattgtgaaaagcagcgcgctgagggtgcgcggtaagtgtccgatagcaagcagcgcggcattgcgtaaagtttgggcgaatgaggctgagaactgcgaggtataggcaaaaaaccaaatacccacggcagctatcaccgccatgccgatcaatactcccgcgcgcattaccagatgcaaagtgggggaggctggcaggtacttgactagttgcagctggtaggcgcccaataaaagcaaggcaaccaatataatgccgccgccaagagcagctcggaagtcagtgccgaagcgccgccagaaagtaaaaccggggcgggcgccctcttcccttacgatctggaaaagtacgtaaaagccagcgcttaaagcggggccaatcgttaccaccgggatgctggcgatggtaataaaggcgctgagcatcgccacatctgcgattagagtcagtacggaggcaaatgatccgtagtgagaaaaaaatcggttcataatagctataaagtatcgctaactgctagtggtggttaaaggcgaggggcttggccggtggattcgccaactaatagtttaccttgcagcagtatctgcggattttctagaggttgtttttttagcttggcgaataacaggcgacaggaaatatcagctaactgatggatgggctgttcaacagtagttagtgcgggactcgtgtagcgcgcgaactggatcccgtcgaagccggttactgaaacttggcggggaatttccagcccggcatctatcagtgccttttgggcgcctaaagcaatcacatcactaatggcggctacggcagtaaaaggtatctggcgcgccagtagcctgcgtgccagctcatatccgtaaccgaatgagtagggatcatcgccttcgttaccccgcacgatcaaacgctcgtcagagctaatcccgtgggcttttagggcggagataaacgctttttctcgaatagctcccaccgagcgctctgcctggtcgggaccaaggaaagcaatctggcggtgtcctaggtcggtgagatgcgaaacgatttgagaaattccgtgggcgtcatcgacgcttacagcagcaatagaactgtcccagccgggagcaggggggatggtgcacagcacgaagggaagcgggaagtcattaaaaatggtagtggattcgcgtgcttcccctcccaagaaaagcaccccggcggctcccgagtcttgataagcgccgcgtccgatatttacctcgtcctcacggtgggaaatccgtaacagtgacatttggtaaccgtgcgcgcggatggcctgctcaatcgggtcgataagggacaagaaaaaagggttcgacggccccttcattaccacggcaatgttgtttaagtgttgagctcgtagggtttgagcatggcgattgggctggtagtgcagttccttggcaattttaaggatccgttcccgggtcgcaggggaaatctcgctctgattatttagtgcgcgcgatacagtggtgataccgacctgggctgcggcagcgacgtctcggatagtcacggcgggcgacggatgcgacatggaaataaatccttgattcaaacggatattttaatgttattaacgatagcagggattggggtggaagcatttttcttccaccccaatccctgagtgaaggttttagcctttaacggcgccagcggccacaccctgaatgatgtacttctgcatgaagatatagaagataacaatcgggataatcgccaataccagcattgccatgagggcacccatgtcccggttaccgttcgaacctagcaggaactgcaccacgatcgggatggtgcggtattcactgcccggccccaagaccaggttggggagcaggaagtcgttccatacccacatggtgttgaggatggccacggtaatcgcggtcggtttgagcatcggcagtaccacccggaaataggtttgtaccgggttgcagccatcgatagtagccgcctcctcaatatcaatcggaatcgatttcacgaatccggcgaacataaagacgctgagtcccgcaccgaagcccaggtagagcaccatcattcccaggggattacctagacccaggatgctggatacctgcaccgtggggaacataaccatctggaaggggatcaccatcgagaatacaaaaatgtagtacaaggcgctggtccaccaactctttacccgggtgatgtagtaggcggtcatcgcgcatagcatcacgataatcgctaccgatccgatagtgattacgaacgaccagagaatcgaactaaagaaattcgaaagctgcagaccagttacgtagttctcaagtcctacgaaagtatctccccaaggtaagccaaaaggattgttcgacagttcgaacttcgacttgaaggagttcataaatacgaacagaatcggcccaaggaatatgcaggtcaagagaatcaagattatgtataaaataaccttgccaatggggttgaccccggaatcctcggtacctttagcaggtttttgcttagcaacaggctgcacggaggcagcggtagtagcggtgctcatgcttcaatctcccttgaacgagttgtccgtagctggaacatggcgatagctaccacgactactacgaagataactgctttggcttgtccaacgccttccatacccacctggttaaacatggagttaacgatgtttagggcaaccatctcggttttccctgagggtgcgccggcagttaacgccaggttctggtcgaacattttgaaggtattcgacaaggttaagaacaggcagatagtgatggagggcatcaccatcggaatggtgacgttgcgcagcacctgccagcggcctgctccatcaatttctgcggcctcggtgagttctggaggaacgttttgcagaccggcaatatagataatcatcatgtagccgattagctgccagttaatcaggataatcaaccctgcataaccgtacttccagtcagtaactagggttgcgccatagttctgcaaaatagcgttgataataatctgccaggtgtagcccaagacgatgccgccaattaggttgggcatgaagaaaactgtgcggaaaaagttagtaccgcgtagtttgcgggttagtacccaagcgatcgcgaacgcaaagagatttacggtaacgatggagacgacaaccacaagtacggtgaagaggaacgccgaggtaaacgtgtctcgagaatcaaaaacctctatgtagttgttaattccgacaaaggttgcatcggtgatagtggtgaattcacaaaaagataggaaaaaaccaacgatgaacggtatcagaaaggcgatcagaaaggctgccaaggtgggcagcacaaaaagtggaaaataatattttaaattcgacttcattgtctatccatttcctttgaccggtggataaaagattttagcaaaaactgggtttactgaagatattctagctgataccgagttgatttgcgtttacttgcgccattaaaggcggggaatgtattgctggcaagggaggtggcagataagaaccgggcggttcccatctgccaccttgccccttgtagggcattcgcctcttttatctaaccgaggttattcctcagttatcttttctcggcggcccagttgtcctggaagttcttaactaccttgttccagtccaggttgccaatggcgtactgtcctagatcctggccaaagtcgtccttaaacttctgcgacgggtacgtggtgaatacccacggcacggtggtcagctccttgttattcatggaagctgcaatttccttggccagcgggtcattcggaatctcatcagcagagaaagacttgaaaggagcgataaagcccaggtcttccactacgaacttcttgccctggggatcgctgaagagccagttgatgaaatcaatggtggccttctgatcagcttcggaggccttagcgttaactgccatgaaggcttcggtacctactgccagaccctgcttttcttcacccttgtgaccggtgtagataggcagcatcttaatcttgtcttccttaactacgttgcctttctcttcggcaacctggctccaagcccagttaccgttttgcaccatagctgctttaccctgcgcaaactcagccatggagtcggctacgttcttgttaggagttagcttgcggtcaacagtggagttatccaagtagaggtcgaaaatattcttgaactctttattgaacttgaactgcgccttggccttgtcggttactttgtccgcttggtactcgtagtacatggggatgttagacaggtgggtctgccaacgccaatcttcacctttagctagcgaagtggaggcaaacaccccttcaattcccaggtcagccttgtgcgcctgcatatcctcaacaacttctttcagttttgcgaagttattgatttcgtccatcttggtggctttggcgccaggcatggcgaagtacttgtccataatttcttcgttgtagacaatgccgtagccttctactgccagaggcactccgtagatcttgccgtcttcgcccttgagcgccaagttcggatcatttagatccttggcaaacttggtgtcggtgaggtcggcggtgtatttctgccagctctttaggcctaccggaccgttcacgttgaacagggtaggagcatcagattttgcaacctcggactttagctgctgttcgtagtttccagaacctacggtctggattttaacttctacgcccttgtctttggtgtaggccgcagcaattttcttgaaggctttttcctgctctggtttccagttcagcatataaaccttgcccttgccgtcgccagcgctggagcctgaagagcaggcggccaagccggtcaacgcaaaagcgctggcaaccaaggttgccagaattcgagttttccttgacattaacgtccccctttggaccttcgattagcaagcgcgggtatgattcccgcacttcatcggaaacgtttccgatgaacgtttccacattatcagttaggagccataaatggaagtgagaactccaaaattgttatcgtcttgttaattttggggttctttttactgatggaggaatataaaaagcggcggcggcgcgggtaaaatccatccgcgccgccgcctagcattgtatttttcagttatttataaaggcgtactcggtcctttaaagcacccggacgtagaccggattcccgtagactcgagcaatctttacccggtcgcccggtttaggagcgtggatcatatagccattgcctaggtaaatccccacgtgatggctatagttcaccatatcgcccggctgagcttgagctctagaaacccgggtaccgacgttcctttgtgcctgggaaacgcggggcagattaactccgaccgcgttcctatagacataggaagttaatcccgagcaatcgaagcccgaaggagtgctgccgccccatacgtagggaacgcctaggaaccgcttggcatatgcaatcaccgctgctcgggagccagtggcattaaccgacatttgcggagctgagaacctcgactggctttgagtgcgagcctgtgcacgggtagcttgtgaccgagtctgtgctcgactagcttgccggcgcgatgccgactgcgaagactgagcccggctacgagcggcttgtgcggcagcctctcgcttagctttttcctcagctgccttcaaagcagcctgtgcggcagcctcttcccgagccttcttctccgcagctatttgttcttggcgctctttttctgcttgttcagttactccccgcgcctctgccagcttcttaaccagttcttcgcgttgtgcactgagctgagccaatttgctctccgactccgctttcagctggtcagctgcatctttttgcacctttacttcttgcgcggcctgctctttttcatccttggcagtgttagcgcgctcctggagtactccggccaccttggagatagagtcgaaagtacgcatctgggcatccgcctttgaaccaaacagttcaacagacaccttcttcatttccacagtctgcagaccatcggcatttaggtaaggagtcagagatgacagtgatccttgagtggtgtaaaccgtacgtgccagccctgctagcgctttccgcgcttgctccactttgtcttgcgcatcctgagaatcctgagcggtcttttctgccgcctgtttggctactaccaggtttgaaatcgcgtcattgtagctggcttccgcgctttctgcgaggtcacgagccttttgggtttcagtatttacctgggcaagttgtgcctcaatggccgctaccgagtttgctgcattattctctgcagctttagcggcgtttaccttgtcatcagctggcgaagcgaacgccgtaggcgcaaaaatagaagcagatgctgctagcgcaaaactggccgagatgaccaggacgcgccttccagctttccgtcccgcaaaattgtgggggttcatagctttcctcctagagcgactttgggagttataagtcggactagatgccacaataccgctcttttacatctctaacaacaactttcacattaacaacacgtgtaacagagatgtgaaaaatgaggtttcggtaataaaacccgtctcttcgtggagaaatgacgacccacaaagagaaaacacgcggaaaacatcaaaatgtgagatgactcactaaaaggtatttttggtgttttccgcgtgtctagcgaaaagaaatctactcggtaatctgcccatcaaagaagtcggcgactagaccgaaatacttcttattattctccgcttcccattccttcatacgttcccgggagcggagaatctccgcttcagcttctttgcgccctacccagtgggcgccctctaccgatttgccaggctctaaatctttataaacttcgaagaagtgctggatctctaggcgatgaaactcagaaatatcttcaatctcggtacgccaagaggcacgctgatccccggcgggaacacacagaaccttgtcgtcaccaccgttttcatcgcgcatccggaacattcccaatgggcggcagcggatgacacagccggggaaagtgctctcctctaagaccactagagcatccagggggtctccgtcctcgcccaaagtgccatcaatgaagccgtagtcatccggatagcgggtggaggtaaacagcatccgatctaatcgaatacgaccagttccatggtcaacctcgtacttgttgcggttgcctttcggaatctcgatagtgacgtcaaattccatttccgtttccccttcccgccttggcaggcgaagtgtgcgacaatcggagcgaaatcaatagcgccgaagtcatggcgtctgctttatatttaagaatacgtggaaaatctgtcagcgaggggaagaatgcgaaaatctgtacttttaccgctgattcttttgctcgccttgctgttgggtggggtggggtacggcgttctggacgcctataatctggttcctggagtgcttactttagaaaaccgctccgtgaatgttccggaaactgtgcaactcgaggtaactgaaaccacagttacagccccggctgggattaacaccagcgcgaaggaagtgaccccaactcaggttcagactctgctcgcagaattagaaaaacaagctggaggcggggtttcttcggcttccacgaatgggcagagcgcagatccagccccagcgagtaccggtgccagagtgggcgcagtggtaatcgacactgccagcgggaagacgattgcccaggtaaacggagaccagttaatgacccccgcttcctccagtaaagtggtggctgccgctacggcgctacacaccctgggaccgcagtaccgtttcactacctctgcgaacctggcaggtaaaaaactttatttaagaggcaacggggatcagctgctagctgcgggtgccggcgatcctgctgccattaccggtcatgcgggtctgggggatttagctgccgaaaccgcgaagaaactaaaggctaagaaactgacttcggtgcagctctttttggatgaaactatttttggtgagcaagcgatgcttccaaactgggttgcacaatcaaacactcaatacgaaacaaaaccggttccgctggcgattcgcaatggactatccagccccgagcttacttacgggtatgttgatgatcctgcgctggcagccgcccaagagtttgctgcacgactaaaagaacagggtatcgaggttggtgaggtagagcgggcaacaacccccaaaagcgccgttaaagttgcccaggtaaaaagcgctaacctccatgaagttacgcatgacaccctgaaagaatcaaacaatatgctggcagaagtgctttgccgggcatcggcagtgaaggccggaacaggagcgaacttccctggggaaataaaagtagcgcgaaaagttttaggagatttaaagctagaagaaaccggttttgaaaaccaagactgttcggggctatcaaccgagaacaaaattaaaccggaactgctggcttcgataattcaaggagccgtccatggcaaggatcggcatttacgtccgctgatttcctcactgccagtaggggctttagacggaactttacatgatcgctacctggaaaaaacagcagccggaagtgtacgcgccaaaactggatctttgcaggcagcccggtctttgactggtctggtgaccaccaaatctggtagaaccctcagcttttgcgtgattgtcgattcctttagagaaggatcagggaatgttgccctgggtgccatcgataattttgtagatggactggcgagtctgtgaccgaaaaagtggtcggcgcaggagggcgaatagaaagagctgttctggcgcagctaaaacaactagaaaaacttcatcccggagccactttactggtggcctgttcgggtggggcagattccctagcccttgccgccgcactggcccgcctggcgcctacgcgtacttttcagctggtggccgcgactgtggatcatgggtggcgccccgaatccgctgctcaggctaggcgggtgcaaaaaacactcaccgagttaggctaccggcaggtagcgctactggagctttcccggcaggaaagtggcggaggtaaagaaggtgccgctcgcaaaggacgctaccgggcgctagcagcagaagctagccgctacgggaagctgggctccgaagtgtttatcgtgctggggcatacccgcgatgaccaggcagaaaccgtgctgctgggactgactcgcggtagcggcacccgcgcgattgcagggatgcgcagctggggaggggacgaaaaaagtagcgaaccgggtatgtacggtactaaaagcggcaagcaggcgggatatttacggccgcttctggaactgccccgccaagatacggtagcggcctgccaggaatgggctctgccctatattgatgacccttcgaactatcccgatggcccggttaaggcagcggacggatctccgctgcgccgcgctgccttgcgccaccagggactacccgccctcgaaaaagccctagggatggatccgcgacctgccttggcgcgtactgccgccctattacaagcagatttagatgccctcgacaccttagctggctcctggtttgaacaggctagacgggaagatcctgcaggcgtgactctggaaaccagccagctgctttcgcagccagctgccattcgcaaacgggtatggcgcctggcagcgctgaccgcaggtgcccgggcgtcagacctgcgcaaagtgcaactagatgccatagatttcttagcgaccgcccgcagaggcaccggccctatccagctgcccggaaaagtaagttgcacccgagtggcaggaagctacgaacttcactttcgaatgccacctacaggatagactgggaaaatggatgcaaatgatatgggcgatgcgctccagcgggtactaatcagcgagcagcaaatcgcggacaagcttggggaaatggctaatcaaatcgaccacgactatcgtgggcgagaaatattgctggtaggggtgctaaaaggtgccactatggtgatggcggatctatcgcgcctcatccacactcccttagaaatcgattggatggcggtgtcctcctatggggcttccaccaaatcctccggggtagtgcggatcctgaaagatctggacactgacctaggtggacgggatgtgctgattgtagaggacgtgattgattccggccttactttggattggctcacccgcaacctgagttcccggggtgcggcctcggtagaaattgcggcgctgctgcgtaaaccggaggcagcgaaagttgcagtggacgtgaaatatgtgggattcgatattcccaatgatttcgtggtgggatacggcctggattatgcggaaaagtaccggaatctgccgttcgtaggcacgctcgctccgcacgtttaccaatagcagcctccttccccagttgagaggacgctgcgccgaaagcataaaatatgggtgagggcgaccagaataagcaattaggaggcaaaccgtttaggcttgtctttataaaataatgccgccacgcggcaccggctaatagggtatgaaaccgataaatggcgaataagaaaaaagatagtcaaaaattgtggctcaaatggggaatcccggcgattctagtaatcgccgtcttttgggcaacttccctgataatggcacccaccatagttgatacctccgaggggatcgcgctgctcaaagggaaaaccgtcgagcgagcgatagtcaatgacggtacccagcaggtaaagctagagctaacgaaaaagtacacccccaaaaacttggggaaagacgcccaggtgattccgccgagtggcgctaaggaagtcacttttactttcgtgcagtctcaggcagagcagataaacgaccttatccaggatggggatcttaagaagggctataactcgattttccccaccggttcttggtggtcagcgcttttgcagatgatgattccgctgctgctgttctttggtcttatctggtgggcaatgtcccggatgcagggcggcggaatgctgggatttggtaaatccaaattcaaaaagtttgacgccagtgcccccaagatcactttcgccaatgttgctggagctgacgaggcagtagaagaactacgagagatccaagagttcctaggcaacccctcgaagttccataacttgggagctcggatccccaagggcgtgctgctatgcggtccccccggaaccggtaaaacgctgctggctaaagcggtagccggggaagctaaagttcccttcttcagcctttccggttcggagttcgtagaaatgttcgtgggcgtgggcgcctcgcgcgtgcgcgacctatttgctcaagcaaaagaatctgctcccgccattgtgttcgttgacgagattgatgcggtgggacgtcaccgcggcactggcatgggcggcggcaatgatgaacgcgaacagaccctgaaccagttgctggtggaaatggatggctttgacgaaaacaccaacgtgattttgattgccgccaccaaccgtcccgatgtactcgatcccgcactgctgcgcccaggacgatttgaccggcaaataaacgtggatgcgcccgatattaagggacgtaaagcgattttgcaggtgcatgccaaaggcaagccgatgaccaccgatgtggatctagaacagatcgctaaacgcacgcccggatttaccggtgccgacctagaaaatgtgcttaacgaggcggcgctgctaactgcccgctctaatgcagatctgatcgatatgcgagcagttgatgaagccatcgaccgggtgattgcgggtccccaaaaacgtacccgggtgatgaatgaccatgacaaactggtcactgcctatcacgagggtggacacgcgctatgtgccgctgccttgcactataccgatccggtcaccaaagttacgattttgccgcgcgggcgcgccctgggatacaccatggtgatgccgactgaggatcgctactcccgcacccgcaaccagctactagatgaactggtctattccatgggaggacgggtagctgaagagctagttttcctggatccttccaccggtgcctccaacgatattgaaaaggccaccgctaatgcgcgccgcctagtaaccgatttcggaatgtcggataaggtagggccggtaaaactgggcaaggaagatagcgaacccttcctaggacgtgatggcttgtccagcagaaactattccgaggcagtggccggcaccatcgatgaagaagtccgtaacttcatggataacgccaaccgcgaggcttgggaaatcctcacccgtaaccgaggaattcttgacgatctagcctgccggttgattgaaaaagaaaccttgctagaggacgagctcaaggaaatattcgagccggtgcaaaaacagcctgaacgggaagtttggtcctatggcaaagagggcgcagttccgggagctgtaatcgggcatccggttaagcaaactcaagcaccggccactgctccgattcccgaacatttggaagtagaaggtaaatagctggtgagttataaccaacaaggggttgagcgggctattcgtgacctgctggtcgctattggcgaagatcccgagcgggaagggctgcaggaaaccccggcacgcatgggcagggcctggaaagaagtaatgtcggggatgcactccgatccggcggcgcctttggaaaaacagttcaaagtggacgatgacgagatggtgatggtgcgggggattcccttctattccctgtgtgagcaccacttattgccgtttttcggagtggcgcacgtagcctatattcctcgtgatggtcggattaccggactgtcgaaactggcgcgagtagtagagggattctcccaccgcctgcaggtgcaagaaagactaactgcgcaggtagcggatgcgttaatggaaaaacttgatccccagggggcggcagtagttatcgagggcgagcatctttgtatgtccatgcggggcattaagaaaccgggggcacgtaccactacctcggcgctgcgcggttctatgcgttcagacccgcgttctcgcgcggaagtgctttctttaatccgcggaaactagatgaggctaggtgctttagcgcatcgaaaaggtaagacaaatatggtttttgcctgcctccagaccgaaagctcgtttaatgacaggtaggctagaaccatgaagattctggagattcctgacctcttgacgccgggacgcaccaaagttatggggatcattaacgtcactccagattctttttccgatggcggagcgtggtttagccccgaaaaagcgatttcgcacgccctcgaattagaagcggagggcgccgatcttctcgatatcgggggcgagtccactagaccgggagcccaatccctaagcccgcaggaagaacaagaccgagtgttgccggtgattcgcggctacctggataaatcttccaatccgctccctatttctttagataccgtaaacgcagaaaccgcccaggcggggatagcggccggggtgcaaatcattaacgacatttccgggggaactctggatccgcagatgctcccggtggtggcggaaaataatgcctactatatttgccaacatatgcggggcaaccccaaaaccatggatagcctgtgtgattacggtggggacgtaatcggcggggtttgtgcgggtctaaagcagcgcgttcaggcctgtgaaaaggccgggattgatctgcggcgactgattttagaccccggtttagggtttgctaaaagcgcgcagcagtcctgggagctactggggaatctcgataagctggcgcaactggggtatccgttgttgattggggcttcccgcaaacgcttcttagagatggcagtacctgccgcctgggataggcatctgcctgcaggggttgaagcgggagccgcgcggcgcgaagcagccaccacggcggtgagtgcgctgtgtggtcaggcaggagtttgggcagttcgagtacataaggttgcggcctcgcttagtgcggtcgcagcggggcaactgtggagggaggcagcatgtcgctaagccaagaggaaatcagtcagcgactggaatatcttgaccatattagcttggtggggattcaggaacgcggactgcatggggtgctcgatcatgaacgccaagacggacagcttttcctggtagacgcggatatttacctggatctgcgggatgccggagccagtgaccagattgcagatacggtggattactcgcggatatccggactgattagccggattattaccggcccgccctgcgacctgctagaaaaagtggccacccagatcgccgaagaaactttgcagctcccgaaagtgcaggccgtgcggatttgcctacacaaaccgcaggcgcccctgggaatagagaaagaggacgtttcggtaactatttggcgtggcctagagaatctgccacccgagccagaagtttcccagatagaaactgctgctctggatttaaacgagattcatgcgcagggtcccttagacagtagtgatagtccgcaagaagaatctgaaaatcccctggagcaggccccggattcgccgcggcaagtggtgattgccatgggtggaaaccttggagaggtcagcgaaactttccggaaagtactcaccgagctttcacaggtcaacggagtaggggttgtggaagtatctccactggtgcgcacggcagcggtgctgggagaaggacaggaagaacaacccgattacctgaatgcggtagtaatcgtttcgacggtgctttccccgcttgatttgctgcgtctgctgcaagagattgaggacgagcatgggcgggagagaaacgagcattggggcgcgcgcaccctcgacctcgacattatcgattatcaaggagttaccagcgaggatgaacgtctaactctgccgcacccccaggctagtcagcgtgcctttgtgcttttgccttggtcgctggtggcgcctgcagccgaacttgcgggcgccggggaagtggtggttttagccgactatgccccggatcgcgatggcgtaaaagagatatatcccgattgggtgggcagcagccattcacacgccgagatcggcaagggatcgatacctttgcctcgttggtcagcagtttcgcgtccaccagcagttccgcgagttttagacgatgcccgcgagttgcatcccagcggacaaattccgcaagttgaggaaaatactgcggagaccactggccagcaggaggacgtggaggcggaaattccgccacttccggttccgcctgcctatgcgccaactgcggtgtcacctccgcctgccagttcccagccgctacccagcatgggcaaggagagcccccaagaggcagtggttttggatgagggattaccggcagaggttaacgaagaggttctagaggaaccgcctgcagaagtggcacccgctaataccagcctctggcagcggattaaagcatttttcaccggtaaaaaaactgaccgggaaaccccgatggaaactttgttacccgcagctgcggcagaagatgaggtatctttgccgagcccggaatggcaatctgttccagccaaagaaaacgaagcccccgaaactgcgtctgagccagaagaaacagttactgaggctccagaagaaatagtcaccgcggagtcagaagcagtagttaccgcggagcaagaggtcgagactatcgaatatggcagtggacgtcacgctggacgcctagtcaccggaccgattccggccctggaagaatctccgttgccacagtctttagagattaccgcgcagcacctagaggtggccgctgattcctctagtagcgacagtgaagcagagcctatggtggagcggcgttccattctgcgtcctaccactacgggagcagtccctgtggtaaagaaggcacctgacactaccgatcagcccaccgcggccttcgatccgttgcaggactccgagtaacagcatgcgaccgctacgaaaatttactttgctagtgctggcgctagttgcgctggttggcggctattttctcagcgacttggcggtgaaaatggggggcagtcccctccaattcagtcccatactgactttgctggtgttttgcggagccattgttttggggattttcgggcaggcagttaaacgcctgcgggatggaaaaccctcctggatacagctagctaaagccccaatggtggcgctggttgcccaagccgcagccgtgtggtcatcgctgtttattggatatttactttcccagttaatcctggtttaccagctacgtcataccgaaatggccggttcctttgccgctagtactattgctttagccctagctaacctgctgctattggtgattgctttgctggtggaatcttggtgcatcattgacgatggcgaggacggtcctgcaggaggaaaaacagctcccgggggtgccaatccggcttctgcctaaaaggctggggtaacctaaggacatgagtccagaccaactccgacgccgctccgataatacgcgtccctcacaaacaactttttgggtacgccggctagtggcattgttagttttggcggtattgatctccctggtagtgctgattgttcgttttgcctggtcatggatgcaggcggcagatgatagtcagcagcgtgctaaagcgcagcaaaccaaagaacagctggtaacccagccaaccgcctgcaaaatgtccaatattgcctacaagttagagccggaaaaggccgaaaatcaggtgggggcaggagttaatttcaaggtagttttgcgtaacaccaagggtaatcaaccctgcaccatgaacggcgcgatagacaaggtgggcgtgaaagtgattactggcgaagacacggtttgggaatcttggaaatgccaggggaaggttgacacccagcccttactgctgggaaccggtatggagtacaacactaccctcacctggaatgggaaagtcgtcagtaactgtaaggttggcgacatggcgcaggccggaacctatcaggcgattccggtcctaaatggtaaagaaatcaccgacggtaaagaagtctttactcttaagtagcctccccttcgggcagtgcgatcataactgcttcagccaggttagttaccggatgtagagtcatccctttaggggcagtaacttcgtcggctcccaggcgaggaatcagggcgtgacgaaaacctagccgcgcggcctcagataagcgtcgcccgcaacccacggtggcgcggatctctccggtcagggacacttccccaatagccaccattttttctaggggaggacgcgactgggcggcactggcgatcgctaacgccaccgccaggtcaactgccggttcgctggttttggctccccccacagtggacacataaacgtcacactgggaaagggcgaggcgcaaacgggcttgcagcaccgctagggtcatcgccacccgtgaataatccagtcccgaggtggtgcgcctggctgatcctcccgataccagcggagacactaaggcttgtatctcggtaggcatcgggcgccgtccctctagggtcacggttacgcaagtaccgggcacccgggaggaagtttgcgaaaggaatagccccgatggatccgctaacccgataattcctcgctctaccagttcaaagcagccaacttcatcggtagctccgtagcggttcttgattgcccgcagcagccgcaggcgggtgtgacgatccccttcgaattgggtgaccacgtctactaggtgttctaggacgcgcgggccggcaatcccgccggatttagtgacgtgtcctaccagcagaaccgggattccgcggcttttggcgacctcgattaaagccgagcagactgcgcgtacctgggtgacatttccggcttgcccactgacctgcgcggaagcaatagtttgtaccgaatccgcaatcactagcgagggggagcattggtcaatatggcctaggacgttttccaattcggtttctgcagccagcaacaaattatctgccagggcgccaatccgctctgcccgcaggcgcacttgggcggctgattcctcaccggtcacatacagtaccgacttgtttttccatttagaagcaacttttccggcaacgtctaatagcagggtggattttcccacccccggttcgcccgccagtaaaaccactgatccggccaccaagccaccgccgagtacccggtcaagttccccaatcccggtagggataaatctggcgtcagcaatatcaacttcactgatgggtagggctttatggctgggagttttgcccgcgatcttgttgcgggaggtcgggggctcgtctgcagggacggtttcctctaaagttccccaagctttgcagttgcggcattgccccagccacttgctggattgccacccgcactcggaacattgatagcttgtctttaccttggccatgccttaactctagcgcggcatgcctgtgaagcattcgggcgcggtaggctggaagcagaacgcgtaattatctacacctggggacaataggaggacacagatggcgaaacgggatactggcgcatctggagtgctggttatcggtttagggcgtttcggctcagcggtggccgcctctttagagagcctagaacgcgaggttttggcggtagaaaaatccccgcggattgtcacccaatggcagtcgcgcttaccggtggtgcaagccgacgctaccagcgctgaagctctacaacagctgggggctaccgattttcaggcagccgtagtcggggtaggaaccgccctagaggcatcggtgctgattaccgcgaacctggtggatttgggaatcgggtcgatctgggcaaaagccacttccctagagcatgggtctatcttaaagcgaatcggcgctcaccacgtggtttaccccgaatatgatgccggggtgcgcaccgctcacctggtgggcggcaagatgctggactatatcgagatggatcgtaagggcttctcggtagtgaaaatgcgtccgcccaaagcttgccacggcttcactttggcagaactggatactcgctcccggtatggggtcacggtaatcggggtgctctctcctggcgaaccttttgaatatgcctctccgcaaacgcgtgtggacgcgaacgacatcattattgtttccggcgatgctgaacttttggagcaatttgcccaaatgccctaacctgcatttttggttgggcttaagggatttaaaaatttttgaggacgcgacgcggctcatcccgccgggacgctctatccccggtaacgtcagtttctaacgcccaaactatccgatgatggggcgttcttcgggcattctgattactctacggcgctcgcgcagggcgagcgccgccgccactgtcatggtgccagtcctgcctgcgaacatcaacagtaccagtgaatatttcccgataattggcaaatctggggtgattccggtcgataatcccacggtggcaaaagcagagatcacttcgaatccgagaacgtccatcgaatagtcggttacagacagcaagaagaagatagcggtcacgaccataatggcacccaggccagtgacagccaccgataagcgcactaccgaggggggaatccgccgatggaaggcctctacgtcccgatccccgcgcgcctcggccataatcgccagaatcatgactgccagggtagagactttgatgcccccggcggtagaggcggatcccccaccgataaacatcagcacgtccaacaggaaccaggatcctctggtcatttggcctacgtcaatagtgctgatcccggaggaacgcgagttgactccgaagagaatcgaggtttgtagagattccgaggtgctcatagaagcgaaggttccgcggttattccattccgagcaggcgattactaccgcggtaaatacccaaacagccaggtaggtagtaatggtcagtttcgagtgcaaactgagtttgtgaggcgagcgccagttctctttcacatctagcaccacggggaaccctagggcgcctaggaaagttcccaggatcaccggggtgatcatccaccaatcgcccaggtgggcatctacgccctccggcagattgattagccccgcgttgttgaagatagagatggactggaatagggcgtgccagatcgcggagcccacagattcgttcaaagttaagaaccggggcaaaagggcaatgaaaataatagcttcacaggtaaaggaggtgacgataaccgtgcgtatcagggcgcccactttacccaaagaggcagttttttcgattgcggccagcattctttgggttagtccgatgtggcgcgatactgccagcgccaagatcgatgccagagtcattacccctaggccgccaatatggatgcccagcataatcacgatttggccaaaaaatgaccagtaggaggcggtgttgactacggtcaacccggttacacaaaccgccgaggtggcggtaaatagcgcgtctaccagaggggcaggtttgccggtagtggtggagatgggtaagcacagcagcaaagtcattacgaagatgatgccagcgaaaaccatcaccaccagccgagcaggggagttgcgggcaatacggtctatggattctcgcagctttgcgcgtttagaaacgttctttttacttgccatcacccctcccttgctgaaagagaaaatatttcctgcctagatactaacccgctaccagtaaaatcggttaggactagcgcaagttcctccctctcgcccgagtagcaatccccagtagcgccctcatcaagtaaagaaagagtaaaagtagggggaactttttatggaaatttgggttagatggtggttttccaataactttcctgtggcagttgtgaaaagtgggttatatggggtagttttagacatggatatgcgaaagtctagattttatccaggctttccgcctaagctattagtaatagtccctaaccggcatggatcaactcaggacggaacattatggcacagcagcaagctccgcgcttcgtaacagtggcagaagtcgcggatctgatgcgcgtgtcaaaaatgacggtttaccgcatgattcacgcgggcgatattcccgcagttcgggtgggtaaatcatttagagttcccgctgctgctgttgatcagatgatggggcaaggttttggtaactgggagcagagctccggggtggccaatagttaacctccgcctaagttgttgtatagtagggcgagaaaaatacctcaggttataagggcgccgcgcgcgcactaagaaacaaaaggagggcctaatgggctcggtagttaagaagcgccgtaagcgtatgtccaagaagaagcaccgtaaactgttgcgtaaaactcgtcaccagcgccgtaacaagaagtaacgggcaaatattttaaatggatccaggatttccctggatccatttttattttccgctatcctacagaagctgtccgcaactgctctttctaagcgctgcggcgctgggggacctcctggctagcgcgaataatctcgcggcgttcttccgcactaagtccgccccaaaccccatagggctcctgggcggccagtgcatattcccggcactgggtgatcaccggacactgagcacagatagctttcgcggcatcatcgcgtcgcttgcgagtacccccgcgttcgccctcgggatggaaaaactgttcggtatccagatcccggcaagctccttggtattgccactcccataaatctgccagtggcgcgggaagtcgcgagaagttactcatcagtgctcctttgtgtccctctaagttatggtcagtatgaaggggttagcttacagttttctgaaaagaacggtattttttagtgaaatctagctaaataaaagtttaattcgcagctcaggagggcaagtaaaagtaattagcgttcagcgaattagtagtgagaataaagtttctgcctcttcctggcaatgctgatgctttcaggaagctggtgccaccgataaacaaacaccggatttaaggtaagacaggtcacatccagcagtgaatttgctggaaaacgtgccaataggtgaataaaagtggcgacaagctggtggttcgggctaatcttaaaaaggtgattatcgaacacctggaagccctagaagggctcacttatgacgacgttctcttactccccgaaactaccgatgtggttccctccgcggtcgatacctccagcaggctaactaaacgaataaccctgcataccccagtaatatctgccgcgatggacacggtcaccgaagccaatatggcgatcgcaatggcgcggcaaggcggtatcggaatcgtgcatcgcaatctaccgattgcggagcaggccgcacaggtgcgacaggttaaacgctctgaatccgggatgattaccgatccggttactatcggaccggatgccactttgctggaactagatcaagaatgtgggcattaccgggtttccggtctgccggtagtggatgaggatcgcaaactcaaagggataatcaccaaccgggatctgcggtttattcccgcaagtaagtgggcgacggtcaaagtgcgggacgccatgacccccatgccgcttactacaggacgcaaagggatggcgcgcgaggaagcgcgggcattgctggccgaaaagaaaatcgaaaagctgccgctagttgatgacgaaggtcgcttgaccgggctaatcacagttaaagatttcgtgaaaaccgaacagtaccccaattccacaaaagacgaagaaggccgcctgcgggtaggtgctgccctgggatattggggagatacttgggaacgcgccgaagccttagcggaagcggaagtagatgtactggtagtcgataccgctaatggtggggcagagctcgccctggaaatgattcgtaagctgaaagcttcccccactttcgctgggatcgagatcatcggcggaaacgtggctactgccgagggtgcgcaggcactgatcgatgccggggtagatgcagtgaaagtcggggtcggacccggttctatctgcaccactcgggtagtggccggggtgggcgtaccccagattaccgcgattaacttggctgctcaggcctgttctaaagcgggggtacctttgattgccgatggtggcctgcaatattcgggagatattgccaaagccatggtggcgggcgccgataccgtgatgttgggttccctgctggcaggctgcgaagaatccccaggtgaactggtgtttgtgaacggtaaacagtataagcattaccgcggtatgggttcgctgggggcgatgagttcgcgtggacgcaaatcctattccaaagatcgctatttccaggcggaagttaccagtgattcgcagatcgttcccgaaggaatcgaggggcaagtgccgttctccggcgcgctatcggcggtgctttatcagctgattgggggactgcggcaatccatgttctataccggttcctccgatatcgctaccttgaaagcgcggggtcgtttcgtgaaagttaccggcgctggcctgcgcgaatcccatccccacgatgtgcagatgaccgcagaagcccccaactaccactcggcagttaaataaccacgtattatttgaaacgaaagtgccgtaaacgcgggcaagttaaggagtaaacggtgggctggattgatgggccatttatgggtttcgataccgaaaccacaggcgtaaaacccgcaaccgatcgcatagttactgcggcctgcgtggaatggcgccatggacaaacccgggagcaaacttggctggctgatccaggtatccccatcccggagcaagcccagcaggttcacgggatttccaccgattatgcccgtgaacatggacgtccgttagagcaagtggtgaccgaggtagcgcaggttctagaggcctgcggtcgagcgcagatcccggtggttatctataacgcctcttttgatttaccgctgctagatagtcatttgaagcgtttagaactgcccaccatgcgcgagcgagtagagtttttgccggtcatcgatcccttggttttagatcgggcactagatcgctatcggcgcggcaaacgcaccctggaggcgctcgcggagttttaccaggtgcgtggggaagatgatttgcatgatgcgttggtcgatgtgcggcaaactattgcggtcttgcgggcgctttgcgctgcctatccccaactagggcagatggatttgcgacaactgcaggactatcagcgggatcagcaccgcgagtgggcgcagcattttaaccagtttctgctgtccaaaggacgcaacgccgatgtgagcgaggagtggctagcgtgagtgagcagcccggttacggttatcgcggcgagggcgagccgcagggaaatccgccaggtatcgccccggaacaagggcgctattttcctccgcgcaaccccaatcagcgcccgcagccagcaggcgctcctcagcctcaagtgccgggcatcccgcaagtttcgcagaccccgggagcggctccgcaaaaccctgttgaacgacccctgcaacacgcggcagccccgcgaccggcacttcctccccgtcaaagcatcagacgtgcgccagaacccgcccagccagctgagagctatccgcaggtcagcccgcgtccagggtcagcaccggccaggtcgcctcgtacctcgactagttcccagcagcacgtcccggcttccgcctcaccggcagcggctgcgggcggctatgacgctcctgcctctgtttatggttctttgcccagcagcgcggcgacgtcacccagtaacttagctgcgccccaaacaagcgcgactgccggtcaggcatcgccgttaaacccggcggtttctcccgaagaagccgatcaggaatctaagtcctctcggcgctccccctggtggctgctatatggcctggtagttgtgcttttaattgccttggttagttggcaaatagtgcggcttagtaccgggaaagttccctctgcgattcccctgggcacccaggcaggtgccactgaaactgcggcggctcccgaacctaagcccattgctactgccgatagcgagcaggtgaaaaaggtattatcagcgcagccggtgagtcccgcgcagctgggagggaacaagaagcgagtaactttccgttctcaatccggaattgcggtttgtacgattgccgagaaactcgaggaggacgtgccaccgttagttccccaggcagcagatgcatcgggtgcgctttctagcggcagcggcgtggtttgcgctactgccagcaactttgatgctgccgggaatgttgggaaatgtaatgaaggcgatttacgcctgtcggtgttgggagtgtgggacgcctcctccggtattggagggtgcgtgaacggtaccaccccgctataccaggatgtagttgctggtcaacgggataacagtggtaaacgtttcgacctgcaatcgctagggccggggcaatacacccaacttggtaaatacgcctgcaccttcgggggtagcgatgttacctgcgtaaatgtttctaccggtaagggctttagcttcgttgatcttggcggatataagttcttctaatagctaggcgggatcgagcagcccgaagtgttcaaaagctgccgccaccccgtcctcctcaatcgagggagcaatccagtccgcaatctcgcttaacttttttgccccgcccgctagagtgatcccgatacccgcgtcgcgcaccatttcaaagtcgtttacggaatccccaatcgcgattgcttggtcaggggaaaccccaaaatgttgcagaacttcacgcatggcggtgcctttattgacgccttttacccccagctccaccatttccccggcgcgcacgtgaaccgatccgggtatcaccataaagcggtctccgaagagccggtgggcttcttcaaagctagaggaggcatcgggggaaagatagaaaacgcattttgctgccgaggtgggaataccgctggttacgtagggcatgatttgttccaggtaagccgaccaatcgccgctggcggcacggtcagactttcccgccaaacggaaaaagtctaggaagttttcagaggggtagaagcggtctttaccttgccaaagccaggtggcaccgctgcggcggaaataagctgtccactcggcgatggcgtcctcgtccatggaatgattggccagtacctggtcatccacttccacgtaggcgccattagcggtaataagcccagaaaagggcaggaaaaacagggagggataaatttcagggaaggaacgcccagtagcgataaatactttgtgtccgccctcggtagccgcggtgatagcttcctttaccttagggctgatcacctggttgtggtcgattatggttccgtctagatccaaaaaagcgaacttgcgcattgctgctccttataagggacacctgccaaagaggaagtctgacagtttccggctctcttccaccctatggggaaaacccagctaatgcgtgcttatgtgggtctccctaacaaaagtgcattacctgctctagctagacagtgcactttaggtgagtgcggggaaagcatttggtgccccgaacaggattcgaacctgcggcctttcgctccggaggcgaacgctctatccactgagctatcggggctggacttcaacgattctacacatttaccccggcgcttactaaatcaacgccctctaattagacgctgattacatttagggaggcagacgctagcgaaggcgggtgcaataatatgaacatgactttttctagcccttatacgcacggttttgcccgggttgccgccattactattcccagccatcccggccagccggatcgaaatgtaccggaaatcgcggcggcagttcgaaaagccgcccgccaaggtgtctgtatcgcggtgtttcccgagatgagtatttccggctataccctcgatgacctggtgttttctgagcgtttgctagatagtgtggagaaaggaatcgaacgcctggccaaagcgacttcggattgcgcacagttaatcgtggtgggagcaccgctgcgaatggcgggacaaatctacgattgcgcggtgttcttggcacgcggaaaagtcgttgccctgactccgaaagttttcccttcaaacgccacttatgaaaaacgctactttacttccggcgcgcacctgcctgcagatgcccgttgggaggcgccccagattccgggagtcagcgaggctcctatagggaacgggataatcaatatcgaggacgtggctggcctggcagtgggggcagaagttggtagtgacgggactgcggcgcgttctctgtcactggcacttgccttgcaaggggcaagggtaatcgtcaatcccgcggcttatcctgccactttagggggcggcgagcagcagaaactactggctgcggccacttcccggcgcgggatttgcgcctatgtacacgcgggagccgggaatggggaatcgtcctctgatgccgcttgggaagggcgaacctttatttaccaggacggctctaagctagcggaaactgaacccttccccagcgaaacccagatcgccctcgccgatattgatttaaccgcgctcgccaatcggagacggcgcgaaagtagtttcgcggatgccagagccgggcaacccgaaaaaccctgggagataaagattcgcctgggagtgggagctgcgggagcggctaccgcctttgacccttgggaaaatcatttacaccctggccagtcagcaggtgaagacgggggagtggagctgattcccagcccgaccaggttccccttcctgcccgtcgatcaagacggcatagaccgcgcctgtcagcaggcattccagattcaggtttatgggctgcaaaaacgtctgcaggctgtcggcaatcccaagatggtgttgggagtatccggagggctagattctactcaggctcttttggtgtgtgcccaggtggccgcgcgcctcggcctcgataaatcccagatcttggcctataccttgcccggtttcgccacctcagcaggaactaaatctcacgcctttaaactgtgtgaatccttggggattaagtgcgaggaaatcgatattcgcccggctgcccggcaaatgctcgccgatatggggcatcctttcgccgaaggcgccgcccaatatgatgtaaccttcgagaacgtgcaggcggggctgcgcaccgactacctgttccggatcgccaaccaccggggcggcctagtgattggaactggggatttatctgagggtgcgctggggtggtgcacttatggggtgggcgaccatatgtcgcattattcggttaaccccggaatccccaaaaccatgctgcaacacatgattcgctgggtctgccggcaaaacctgttcggtgaagcctgcacgaaagtgctgaaagatattttggcgcaagaaatctccccggaactgattccgggaggcgaggaaaaactgcaatccacccaggacactatcggcccttacgagctacacgaattcttcctctaccacctgctattagggcgcgaaccccgcgatattgcctatctggcgcaccaggcgtgggcagataaacaaaaggggctatggccggcagacctgccagaatcagatcgtcaccaatacgatttggcaactattttgcgctggttgcgcgagtttttgcgccgcttctttacctcccagttcaaacggacttgcgtgcctggcgggccaggaataactgctggattcggtctcagtccccgcggtgatctgcggatgccctcggatatttccggagaaatttggattaaacaggttgacgagttgctttcggctttagaggacgaaaagtaggctattagtcgctaaagccatgcggtgattccgttcgtcgagggaagcgcctcgcccgtcctcgcctggtacctaactcttcattagcaggaaacgctgcgtcctccctacggatatttccttttgtccaaagagagccgcagctacctaagagagctagagcacctcaaattaactaagcgggtgcgatgggatattttggaagcaaagaagaaaaatcggtgaaaccagggcgcttacccccgctggttattgcccatgaaaatggcggttatccgcccaactttaggaggaacagtgagcgaacgcgaagcgacgctaaccccggaaatactatctgaactgcgcaaagacttctacgcggatccgcgcggtaagttaatgcaaaacgcggttaccaactcagatattgaccaggtggcgcaaaatcaccaagtggtggcgtatgcggatcgttccatgtcccacaagatagatgcttggccggtggctaaccaaaagaaatcgggacgctgctggctattcgccggtctgaatctgctgcgttcctccatgattaagcgactaaatgtcgagaacttcgagttttcccaggcctacctgttctattgggacaaactagaaaaagccaactatttctttgaatcccagattgagctggcggatcgagatatcgatgaccgcacggtcgcccacctgctagccgacccgattggggatgggggacagtggaatatgttcgtggcgctagtcgataaatacggggtggttccaaagtgggcaatgccagaaaccgaatcctcctctaactcaaagaaaatggatcggatcctggaacgttacctgcgggaaggggcgctggccctgcgaaaagccgcgcaaaaaaatcccgaaactgtcgccgaagttaaagctagcctgctgggtggggtacaccggattcttaatatccacctgggaacgcccccggaaaagttcgtgtggcaatacaacgataaagacaataagtttgagcggctaggggaagtgactccccaacagttcgcggataaatatatcgtcaatgacctgcgtaactatatttgcctagttaatgatccgcgcgaagctaacccttacgggaaaacttataccgtggatcggctgggtaacgtgctgggagctgctccggtacggtacctaaatgtaccgatgcaggtaatgaaggattgtgcggccaccgtactgcaggcaggaaaaccggtttggttcggttgcgacaccgagcagcaggcagatcgggagttttccctttgggacaagaacctctacgactatggcggagtatatggggtacatttcgggatggacaagcaagaacgcctgctttcccacgaatccttaatgacgcacgccatgttgttcgtgggggtcgatatattggacggcaaaccgcgtcgttggcgggtagaaaactcttggggctgcgaagaccgtgctgacgaggggttttatactatgaatgattcctggtttgacgagtacgtttttgaaatcgcggtgcatcgtgaccggctccccgaagaataccgggaggttatcgattctaaggatgagccgatagtgttgccggcttgggatccgatggggtcgctggcctagaccttgggcggtaggttctagggaaattttccctagattccggtgggcatgatcatgccgccgtagggagccagaataaaaagcgttaccgaaagggcgaaaaggccaaggcagtcaagctgccaggaacgcactgcacaccaggcgtttggggagcggtcaaatagccggtaaacccccagtagcagcagcattagagaaaacatgcggctggcgaacaccggatgcccgatgaaacctaaggtaactatgccgataattcctatcagtagcgccgcggtgcaggcgcgacgccagagacgattattcgacaaatccatgtccccagtttaactgggacaagatagagagtagctaaaacagtaggctgggagttgtgtttaagtcctatcgagagatttttgcttaccccggtgcgctcagtttttccatcgccggggcgattgcgcgttttccgatggcgatggcagggctttctaccctgttaatgatttctaccctttacggggaatattccctggcgggacaggtgaacgcggtagtggtgattaccatggcagcggcctcgccaatccaggcgcagctggtggatcggcatgggcaagcaaaaattttgcgtcctctggtagctgcctccctgattttgttggctgctttaactgtggcgaccctctatcatgctccgcgctggacgctctatgtaattgctgccctttcgggggctactaccggctctttcggggctttcgtgagggcgcgctggactcatcttttagccggttcccgcaaactgaacacggcctatgcttttgaggccgccctcgacgaagttatttttattttcggtccgattattgccaccgtcctggccacagtcgtgcatccggcagcgggaatcatcgcgtgcctgctgacttcgggaatcggtggcttctggttcttggcgcagcggcaaaccgagcccactccccgcgggaaagctgatttctctcctgaggaagcaaaaccgctactgaaatcggcagcgatggtggtgttagggacaatcttcatgctctgcggcctcacttttggtgccctagatttaaccgtagtggcctattgccgggaaatcggtttgccccaaatcgccggcatcctgctagccatgttcggggttacttcctttttagccgcgataatctatggtgctaaagagtggggaatctcggctttgcgcctgttcgtagggggaatcatcctgatggcgctgggcttttccacctttttcttcgcatccaacgcctggattttagggctctgcctggcgctaactggcgccacctacgcgcccaccatgaccaatgcgaccaatattttggctaatctggttccctcttcccgtttcaccgaaggcatggcctggttaaacactttctttaccttgggaatctcggcgggcgcctggattgggggcaacgtagtggacgcgggcggagcccgggctggtctgtgggtggtgatcgccgcggcttgggcgatcctcgcggttgtcttggcaggttctctgcctttgcgtaactcgctgcgccgcgcctataagcgccgcctagtggcagtggacctgcacctggcaaagccagattcaccagatttgcatcctcaaggtgaccccaggaagaaaggcaagtccctgggctagtgtctgtgtcggtattggggaaaggtaagccaatccccgacaggttattttgcgcgataaatatgtctacggaaaagcgtaaagacaatcagacccagtacagcagtgcagccacaaattagcatcaaattcgcgtagctggcagcgtctccagtggctccagtaaatgaagatcctgcgagagtgttagctcccattaggctgccgatgatggagataccgatagaggcggtcacgttcatgatcaggtcattcatacccacacctcgcccggattcctctttaggtacggtgcctagcacggtggaaactaccggcgaatacatcaggccgcatccagcgtagaaaacgcaagcaaaaatggtgagctgcaagaatcctgattccacgctgaaagcggctccaaaccagccgacggtcatcagagtaccggcggtatagattccagcctgtttccctatttttcctacaatcgcaccggagcttattcctactatcgctgccaccacaaatgcccagacaatgtaatgcgaaaccttcgtggtggtcattccatacatggtggtcccgatggcgttgaagatgggcgagatgcagtagttcacggagtaaaagacaagtatcaggctgattgccagcacccagcgggtatttttgaaaaattcgggggtaataaacggatgcttcgctttattgatatagatagcgaaaatgcagaatagcgccagagctactgccagcatccaccagttcatgtaggtgaagaatagcgtcagaattgctaccgctacaccgaagatggtgaacccggtggcgtcaattttctctccggtactgctcttatcgggaagagaatgtagcagtaaaggcaagaataggatggttactgcaggtaccaggaagagatactgccaggcgatggcgcttagtaaaccggcagagaaaaccccgatagaggcagataattgataaccggcggtaaacagcccgaagaaaataacttttaactcgtccttcagatatttggtggcaataaccagaaatacggaaccggctacctgttccccagcggtttgtaacacccgcgcgataatcactgtccagaggttaggggtgaagcaaaaatttgctacaaacccaaatatggagccaataaagagagtgataagccccaagactacgagcttctttagagaaacaaaatctcctagagatccgtaaatgaagcaaacaatacccaaaacgatactgggaaacgcggtaatgagggaggcctgcatgggcgcaccaacatccgttcccacctgggtgtacacaaggttgaatccttgcagacacagagtacctaaaataaaagtaattaatagggggatgagggcgcggattgccattttattgctggtttccgggtcggaaaatggatcaaccttcgcgctagtcggtttgggattggttttcatagtctgcttcttttctggattggatgaatgagtaatcgtgctacttagctgagcgagccactgaacctattcgggtcataaactcgtcgaggaagcggggtacgtccactgcgacagccacttccattgttttttggggatcgttaagccgttcgacatcgccgattgtgcgaccacgagtaggctcgctgcaatctactttcatatttatcggcaaggtttctaccagactggaatctgccgcgacggctacggcgagcggatcgtgtaagccgcatcctcccagatgaggggcggtggtttcgtaagctttaatgtaatagtcggtcatatcggcgaggaactctccggctggggttccaacggcgcgccattgctgggtttctttataggtaagaagagtctgcaaagtaacgtccaaacctatcatggtggcgggtatcccggagcggaacaccaggtcagctgcttctggatcttgagagatgttggcttctgcgcaagcgttaacattcccaccgactgtgagggcgcctcccataagcacaactttgccgatttgcttagtgatatcaggggctttctctatggcggcagctagatttgtgagtggcccggtggggacataaatcagttctttgccgtaggtttctactgcttcaatcagaaaatcgactgccgatttcttttcagcgctgcgggttgaggaggggatatcaacatcgccaatcccattaaggccgtgaataaaatgggatatttctagcacttcaaactgagaggcggtacgagcatgggagatgccgggaaatacttttacttcggggtgtccaagaacgtctgttaccgccaaagagttttgtattccttgttctagtaacacatttccgaaagtgccggtgatggcaatcagatctaactcggggcttcccaatgcataggcgatagctaatgcatcgtccactccggtgtctaaatctaggatcagcttctttgccacaattgtctccttttctgatttcttcacaggcgtcactgcagaacaagagcgaagtcttcaatgaaggttatttcaggtaaatatatcaaaggagcgcgccgcagatgacggaaatgcgcgccaaattttttctgaaattcagttaatgaatcaaggcgaattcctcgtttgccaaagctaagtacggcctggttgacgcgctcaatatacctaaggcacgtcgaacccttgtgtaattatgtactacaaatatgtagttattatctaaaaataaattcgaatgggaattgaagtggatatatatgtaaatcctagagtccaagaacaccacccagatatgagcccggcaacggtacaagaagcgtggaataccaccctaagatgcattccccgcgacactgatcccgtcaaatgggtaggggttggaatcgcggacggtaagctaatcgaatatattgccatcgaaaataacgatgaaacctggcatattttccaggatatgaaagcgagcaaaaagacgttaagagaggtagggctagaaaaatgaaatggacggccacaaacggaacaacctacaacgacgaacaagtcgagcagtgggcgaaggtgcaagaaagcgaagctgaatacagcggcgaacaccttacctccacgatgtctggccggcctgttagtgtcgggaaaaatgctcatccctttaagatccgactagacgaagcacgtcgaaacaagatcaataccatagctaaggaactgggtactacccccagccatctggtacgcgaccttatcgatgctttatagtcgcagtcagataaaaccaagagctagatttgagtgctttaaactaacccgggcgaggggactagcccaggctcttggttccagttgtcttttaacacggctttttgcaggtggtggcgcgttgcagtaaggagggacgaatcgtgatttcctgcccgggctcccccggggcagcgtagcgcttagctaaggcggtaacggcttgctcgcccaattgccccgcatgttggtcgatcgaagtaatcgaaaactcttctaactgtcccaaataggtatcgtcataggtgattaacccacagtctttacctggttccatcccgagggcgcgcagcgcggtacaggcttcgatcgctatcagattgttgtgggcaatgaatgccggtcgcttggccactgacccctctaggcactgacggatttgttcacccggttccaggtcgggcagtaaggcttggaatcccgggaatttctttttctttttgcgcaagctttcaaaagctgcccgctgcgctttacgacgagtaactactgcctgatcaacgctttccggactggacagagaaaagatacggtcatagccgcactcggccaggtgagtgattgccaagcgagcagccgcgtcctcgtcgatatggatagagtcaatttttcccgccacgtactttaatcccagaactgcaagcgggaaggtttcagataggcgcgccaggcgttcttgggaggaggcaggtgagatcaggatgaccccaatggtctgcatctcctggtagcggtttatcaggttccactctttttccggatcctgccgtgcggtcgacaccagcgataacagtttgttttcttctgcggccagccgtagcgagtcctctacctcttcaaagaaaggattttgtaggtcggggagaattacccctagtaagtcagttccggaggtcgataagaacgcggcgttttgattgcgcacgtatcccatttccgaggcgacgcgcaggatattggctttggtttccgcatttacccgcggagagtcagatagcgccagggaaactaatccgcgcgacactcccgctttgtgggctacatctgcttgtgtagggcgagaactcataacctaagtataaaataacgcgcgctaaattttggggtggcatactcaaagaaaaaaagtttgtgctagtagatagggaaataacctaaaaagtgaaataataatttttcccgaaaataactcttgaattattgagattcttcctttactatggaaagtagttaacacgtgttaacaacggttcgttgcggcggctgtcaaaatgttttcggcactaacggaactcaaagaggagaaaaatgactaaagaaactctatcggtggcggtgattggcgcgggtatggccgggcgtactcacgcagatggttggcgccaagccaataccgtattcgcgtcagagctaccccggttacggctagcgactatcgctgatgcctatctgccctttgcggaagccgctgcccgtgattacggctacgaaaaggctactgacaactggaaagacatttttgacgatcccgagatcgacattgtttccattgtggtgggcaacaagttgcaccgtgaaatggcggaagcattggtgaaagcgggcaaacacgtcctgtgcgaaaaaccccttaccgataacctagaggatgccgaagccatggcggaatttggggcaactgataaagtagttaccggtctgggctactgctaccgtcgcaatccgggactggcgaagattgcggaaatggtgcaaagcggacagctgggagaaatcacccattttgacgcgcgttactggtgcgattacggttgcgacccgaacactccgattgcttggcgctataagggaccgatgggctcgggcgctcttggagatgtgggcagccatctagttgatacctcagaatttatctgtggtcctctaaaggcggttgcgggtgcgcagctatccacggtaattaagaagcgccctccggccctaaagggagtagcaggaggacgcggcgcgtcctcgcagtcggaagcgaccgaaatcgtagaaaatgatgacgtcgctacctgcaccctgaaatttgaaaacggaattatcggaactttctcggtatctcgggtagcgttcggatcgccgaactccatgcaaataaccgtgaacggcactaaaggaatggtttccttcgatatggcgcgtgccggcgaaatcatggttgatgatcaaagcgctcctgccgggctcggtgggccgcgccgcgtcctcgttaatcccgacttcccctatttcaagggcggatcctcgatggactttgggggagtgggagttactcaaatccagcagttcgtttaccaggctcacgccttcttagaacaggtggctggggtcaaagacggattgcctcccacgcctgactttgcctatggataccgctccatgcgtatcctcgacaccattgccaaatgcgcagccaacggtggcgccgaaatggaaattaaataaccaagataacgaaaaggaaaaaaccatggctatgaatctaggtgcttacaccgcttgtctacacaacttcaccctgcccgaggcactcgatcatttgaaatccttcgggttaaccggcgcggaagtaaacgtgggaggcttcattccctccccgcactgcccggttgacctgctcatcggttcaaaaaccgctcgcgaagactacctggggattttcgaagaaaaaggaatgcgcctcgccgggctgaacacctccggtaacgtcgccgacccgctgcccgatgtggggccgcgccacacctatgaccttaagcgcgccatcgaacttgccggaaaactcggagtcggagaaatcgtgtgtatgtccggtctgcccggcaccgatccggacgccaaatatccggcatgggtagttaacccctggaacggtgaacagctagaagtcctggaataccagtacggggtgctagagaaattctggaaagaaatggatctgcgcgcccaagatgcgggagtgaaactggcgtgggaactgcaccccaccaacaccgttttcacccccacccagttcctagagttcgaggaacgcgtcggcggtttcaagaacatcggggtaaatatggatccctctcacctgatgtggcaggggatggacattatgaaatccattgaactgctcggtgacaagatcgtgcacgtgcatgccaaagacaccaagattgagccgggagtagccactcgcggggtactcgatccttccttcgggccggttcccgaggacgaatccgcgcgtaccccagtagggatggatcactactgctcgtcctggccttctgatcccgcctggcgcttcgttgccatcggtgaaggtcacgacgtgccttggtggagtgagttcctatcggcgatcgccaagatcgatccggaaatgaacatcaacatcgagcacgaggatgccgcctacgatcagctagaaggcatccgcctcggggcagaaaacctgatcgccgcgcagagcgcttagcgccgcacctgccacaccgggcgaatcgataccatttccaccatcgcgttttcgggagaatcaatagcgaaacgaaccgctctggctacggatcccgcagtcatgcgatctgcgggatccgtagtagtcagcgtcctcctgcaaaacgtgttgcatatcggtatcgactcgcccggggtggatagaggtgacccaaacgcccagtggttggaaattaattctctttatcgcgatatttcttgagatcttcttctttgcccgcaagcttctttttcttgtgctgtttgacaacatcgcccgcgaaatcaggaacatattttgaaaccgccaccgaggggcgcacatagccgctggaatcgggacggggaggaagtttaatcggttccgcctgtttttcaatctcggtatagggaatagagctgaggaaatggtgaatcatgttcagccgtgcctgcttcttggaatcagaaagcacgtgatgccaaggcgccaccgaagtgtcggtatgtaccatcatgtcgtccttggcgcgcgaataatcttcccaccgggtgatggactctaaatccatcggggagagtttccactggcgcaaggggtctcccaggcgggatttgaaacgcttgtactgtactttatccgatacgctgaaccagtatttacgcaggtagatgccgtcctcgactagcatttgttcaaaaatggggcattggcgcataaatagttgtacttgatcggggcgggcaaatcccatcactttttctaccccggcgcggttgtaccaagaccggtcgaagaggacaatttcgccggcagccggcaggtgctcgatataacgctggaagtaccattgggtttcttgacgctcagtaggcttaggcagagccacaatccgagccacgcgtggagacaagtactcggtcatccgtttaatggtgccgcctttaccggcagcatcgcgaccttcgaaaataactacaatccgggcgccggtggctttcacccaagtctgcagtttgcccagttcaccctgcaaacggtaaagctcggcctcgtaaactttattagggattttctgtaccttgatttcgtcagcttcgctaatcccgttttccttcttatggctcatctatttctcccgagttggcgtcaattcttaggttagaacagggtttgcctgctaggaggcaaaatggggagcagttttgccaaggggtaggcacgcagaggcaaaacgggataatttggggttatggaatttaaagtcattgatcatccgctggtcaaacataagctaactgttctgcgagataaagagaccccatcatcagtgttccggcaactggttgatgaactggttaccctgttggcctacgaggcgacgcgtcacgtgcgggttagccccaaacagatagaaaccccgattgagcagatggagggcgaaactctttcggctccccgtccgatcgtgatcccgattctgcgtgccggtctggggatgctttacggtatgaacgcgttgctccccacggcggaggtcggtttcctggggatgaaacgggacgaaaagactttagcaattgagacttatgcgaaccgtctgcctcaggatttaactgatcggcaagtattcctggtcgatcccatgctcgctaccggcggcactttggtggcggcgattgattacgctttggagcgaggcgcccgggacgtgacctgcatctgcctagtggcggcgcctgaaggggttaagcacgtggaagagcatatcggtcagcgagcaaatgtcaccgtggtggtggcggccctggacgatggactcacccctgaagcttatattcgtcctggtctaggcgatgctggtgaccggctgtatgggatagtagatcactagtattgcgtggtggcgctttggcgcggctgtattccgtggttgcctgacacggtagcgatgccggtgagctggttgcttgactggtgcattgaccggttgagctgtcgcgggagtggtcacatttctcgtccaaagtttagttctggcgtgcatatccgctaaacttttgaaggtctgttaattgctaatacagctaatacagcactggtagcgtgtccgagcggccgaaggtgcagcactcgaaatgctgtgtggggcaacccaccgtgggttcaaatcccaccgctaccgcaaggagaaaaatgccccaagcgcttgcgcttgtgggcattttttgacgcagcggtatgtaaaactgcgtagcggttttactaataccgcaaggtgttgggtggggtttggttttgggtgtgttgccccaagcgcttgcgcttgtgggcattttttgacgcagcggtatgtaaaactgcgtagcggttttactaataccgcaaggtgttgggtggggtttggttgttgggtgtgttgccccaagcactggaggttagggggttaggtcaccgcgtcctcaaaaatattttccaaagcactgcgggttataaatctataagctaatatcaatatcgtcttaaaaatttactagctatcggtgcggataggtagtttgaatgtttctttagaaaggaacctgctatgacagttgaacgttttgatatgcgggcatatgtgtttcaagatgttaatccacttccggttgatgttgctgaaccggaaaagtttccagaggccgcggcggattacgcggtttatgggtcgatcagaatctacgatcatggtgatattattgtgggtagggatgtattttctggagagttctggccgggagggcttccgccgcgaaacacaaaatcagtggtagcggtgccctttgctattgatccggaagagattcccagtagaaatgctgtttacgatgaagtcaacgagacatttgcagagcaactggtgaaaatttgggagggcgaggctcccgcgacaaatattgcggatgctgcccggctgcatgttttccatagacgcatggatgaaaaagaaggaaataaggcgttttctctccgagttaattccaggttatttttacttttctttttcgttacgaaatccctggatgaattaatagaggaagggattacggtttctcctcaaccttattggcctttcgaagtggtaaggccgtaccgttggggatactggaaccgcgctttggccaccgattaccagggactgtatgacttcgtagtgcgaaagtatgggatcaaggctgctcgtcctgacagcttcgtgtcgtatgcctttgcggatgccttacgggagtcatccgtagccgactttttccaagattttctcagtagcccgccgcctaaggttccttcggtcggcaggcgcaagatcatgcctgggcaggaccttaacgtgttccagcagtacctgaaggacaataacctcacgattgaggacgtagagtaagagcgccttctaccctttcttccctcccgtaatgctttccaaagcactgcgagttataaatctataagctaatatagatatccggtgctcctttagctatcgatgccgatagctagggacacaagttcacttaacagaaaaggaaaaccaaaatatgaaaagagttcgcttttgggatgacaagcccctggatgaatccggaattatgaatctcccggtgcagggggtagacccgcaagaatttgctgccacggtagttgatttgatgcaggctaagctcactgatggtggccccggatcgggcgccgatgaacataccggagaattctggcacggactggtgccagctcccgccactaaatcagtaatagcgattcccttcgctattgatcctgatgatattcccgatgaaagcacccccttcgagccctggtttgccgaaatccaaagccctttgccgggtaacgtggtgagaacctggcaaggaacgcgggttcgaaccagcattgtggacgcgttgcatttccacatgtttggagctttcgacaagaactttgtgaaagcggctttttcgctccggattaacagcgcattctttatgctgctttgttttgcgaacaaaaatctcgaatacctagaaaataacggggtgcccgtccgggcgaatcctacttctcctttctaccttctgcatcctgagctctggggttactggcaaaacgcggtggccactgattttcaggggttatatgacttggtattccagaaccaaggagtcaaggctgcacgtcctgatacttttgtttcagctgcgatggctaaagcaatagcttcctcgcccttggcgtcactgtacggagatttccttaacagtcgtcctcccaaggttccttcggtcggcaggcgcaagattatgcctgggcaaaagttaaataaattccagcagtacctgaaagacaataacctcacgattgaggacgtggaataggcatatttttgacgtcgggttccatctagttgagggggatgggccccgatgttaacacttgcctactggaagttccctgcctgtatcgacaaagcccatgttttggttgcgcagacgtaggcagggaactttcctttttcacgtgtgcttggtgctaggggactaatcaaggctgtcgtgttttctcctgtaagtatcaaaaatggttagtagcgcaggttatcacagcggatcgcaactttcctgtgaagtagcttaccttaccttaggggataaatacttaattattctgggaaagtgcgctaggctggaaggctttctattccccagaagtggcggcggcgccctcgtgagtaagtaagtaaggagaagaaaatggtggcagacaaagataagggttgggtgtttcttgatcccaacgcgcaggatcagaccgatttcatagtggggctcacgaagtattgcttcgaggtaaatccgaaggcaatatcccagaaaacttgggaagaaaattgtcgcagtatcgtagagtgttttccccatgaagattacggtcggtacgatccggaaaagatactggcgcgggcagggatcagcaaagagctgtgcgagcagaccagggagcaactccaagaagcctagagcgatgctggtcgcggggcttgagctgccttaagggctggccgggcgcgatagggtggaaaaggtagtagtggctgcggccaaggtagctaataggcgaggcacggtgggaagacgtagcaagcgaagggcggggacgcgcccgcctgcgcggggtggaatcgacccggtggggtttaccgctaatggtaagggctcgttgggtcagcagttgcaagcccaactggaacgaaaactatcactgactgccggcgagattgcggcttttgtctcgaaagcgttcgcggccggggatgtggtgtctcccttggggatcgtgttatccccggacagccaactattggaggggcaacgctactacctgcatcggacggctctcgatgaaggcgctcccttaccgaagttgcaggtgctttgggaaggcgagggcgcaatcgtagtaaataaacccgccagcctggcaacgattccccgcggctcctggattacccgctcggtagtggtagctgctcgccgccagtttcacaatgatcagatcagcgccgcgcaccgcctagatcgcctgactaccggatgtttattgctgaccctagatccgaagtatcgggcgcgttaccagcagctatttgaccgccgtcaagtaaagaaaatctacctggcacgcagccgtggcggtagcggcaggggagcagggtcggttccccaggtggggaagcatttcgatttccagctccctatgtttaaggaaaccggctcgctgacagtatcgatagaagtgcccccggtcgggaggaagataacccgctgccaaagccgcacccgcggcctcgtcctcggaaaattccccctccctgaaaagacagaaaagccggaggcagaggtagacgcaaacccggacaacccgggatacgcgccagaagcagaactgttgtggcagttagagccagaaaccggatttactcatcagctgcgcgctaccttggcgcatttcgggtatcccctcgtaggtgatcccctttatccgatagtcctacctgcagatgccccagaaaatgttgagccccagctttgcctgcacgcccaagagctgcggtttcccgatccggaaaatcccgctaacctcataaccgtcactgcccccgcccccagctgggcaaaaggtgccttaagctgacttccgaattgctgagattggtagacatgcaccgagccccagcgttaacacgcaagaaaaatacgcaagaattgcgtattaactattgataaaacacgcaagaattgcgggcaaactgttcagaagatacgcaacaattacgtattcttcgcaggggcaatacctcctgacgttgatacagataacccggtaaatagagaatcagctctcaatatcttccctggctaagacaggggctggagataacccgtaagctataacctatgcgagaaaggctgccgtttttatttatccaatgccgtcccgccggaaagattgcgcgtgacgagctgcagaccattgccgaggtcaccgggctaaagattggccaggagctgaacgcgcacctgttaccagaggaaaatgaccttgatctgctgcgggacctggatatagaaaacggatatagcgcagtaattatttccggatccccttttcgggcaagcctgccaaccggctccaaagaatctgaagagcagcagctaaataaccggctaatcccctttatgcgttacctgctggacaaggactttcccaccttggggctctgctacggcatgcaaatgttagggctggctgctggcgctgctttgaccgaccgcactggcgaagacctgcaggcggtggaggttaccttaaccgcggaagggctctccgacccggtgagcggacagctagagccagtaatccgcggctacaccggacatggggattcactcgcgaatctgccggagggcgcaactttgcttggaagcgggaaacattgccgttaccagctacttcgttttcataagcacctgtatggcacccagtttcatcccgaaattaccactgcggggatgcagatccgcatcgaccaatacggggatgcctattatgcggcagctgaacgcgaagcggtcatcgcccgctgcatgaccaaagatgtaaccagttcccaccggctgctatcagcctttactgaacattaccgtcgttaggaggcaccagatgggtatcaagttttcacaatctgagcgttcgaccatcggtatcgaatgggaactacagctaatcgacaaagactcctttgacctgcggcaatgtgctagcgcagtgatcgaggaagtagagcgcttacacccgcagaactcactggtacaccgggagatgctgcttaatacggtagaagttatctcccgtcctcgccgcaacgtgcgcgattgcctcatggatttgaaagagggaataaacctggtgcggccggtcacctccgcgttgcgcgtggagttagcttccgcaggatctcatcccttcgccaaccctagctaccagcaggtcaccgatagtaaacgctatgaagaactggtcaaccgcacccaatattggggacgccaaatgctacttttcggcacccacgtacatgtcggggtagagaatcgcgacaaggtactgccgatccaaaactatttgaccagcaaacttgggcatattcaggcgctattcgcttcctcgccctattgggcgggagtcgataccgggtactgcgacaaccgcgcgatggtgtttcaacagctgcccactgcgggaaaaccctatcaatttgaaacctgggaagatctggaagatttcacctccggaatgctgaaaaccggggtgatcgattcctttgatcaggtgcgctgggatattcgcccttcgcccaagtttggcactattgaagcgcgcgtagccgatgcttcctcgactttgaaagaggtcgctgcctgcgccgctctcacccaagccctggtagaaaccgcgtcacggcagctagacgccggcaaagaactgccggtactgcccgattggttcgtgcgagagaaccgttggcgggctgcgcgctacgggatggatgccattttgattgaggacgcgcacggggaagaagccctgctcaccgaatctctgccggcttggctagaagaactcgcgcctgccgctgaagatctaggctgcgcggaagaactctggtcgctgctcgacatcgtgaaactgggagtcggctaccagcggcaacgcatcatttttgaacataccaactcctatgaggcagtagttgccttcctgatggcagaaatggaggcaggcgagccgctcgatcctgggcacttcgtagacaaatccctgcaccaaagcggagtcaaaggctggaaagtccgcgcccgctaagcgcattagcctcaggcgcgaacgtttggaaagggcgcgggaaaagatacgacagggggcctgagccgaacttgttgaggctcacggggtccccggagtgcttttcccacgcccgttgcccagggtgtgctgcactgccaacacgttattagcacggggaaggactatagttgtttggcatctgtgagcgcgggggagagttttatccgagtgggtgcggtgggcataagaaatcggggagagacctagtctctccccgatttcttgggcaggaggaaaaatccctcccttgcgcttaagctctactgattatccggagcttcggtttcggcgggagcgtcagcagtaaacatgtcatggtcaacgtagttgcgcaccaccaaccaggccagtgccaacaccgcggtcaccgaggcgaacgcgataatcgctgccggcccgagtccgccctcgaaccacataagcacgatcatggaggcaaacaccgctagcactatgtagttggtgtaaggtgcccagggaacatggaacttaggacgctccagcccgttgcggcggcagtgacgcacgaacaagatattcgagatcatcacggaaccccacatagagcaaatcccaatccccgccatataggcgatgacgtcaaacgcttcggtggggtggatcatattgataaatacccccaccaatccaatagtgccagcagccacaatcgccgcgtaaggtaccgcgttgcggttcatccccgccaagaagcgcggagccgaaccagaaaccgctagggagcgcaagccgcgaccacaggtataaagttccgcgttaatcgcgctggctgccgccaacatcaccacaatattcataatggtgccggcagcgggaataccaatggcagtaaagaaagtaacgaagggggattcgttcttgtcgtaaacattgtgtggcaacagcaaagtgaagagcacgatgcagcccatgtagaaaagcaaaatacgccacatcatagagttaactgcccggggcaattctttttgcggatcctcggcctcgccagcagcggcacccaagtattcggtaccaccgtaagcaaacagcacccccagcgacatagtgaccatggtgaaagcgcccttggggaagaggccgccgttatcggtaatcgcacccacccccggatggtaaacatggccgcccacggtcaggttgatgcccagaatcaagaccacaatcgccaaaatcatgaagattacaatcgccgcgaccttaatcatcgcgaaccagaactcgaactccccgaaaaactttacggaagcgaggtttactatcaccatcagcgccaaggcgatgaaagcccagccccactggggaatcacctggaagattttccagtaatgcatatagttagcaatcgcggtgatatcggccatcagcgccgaagaataggtaataaaggcaaaccaaccggtgaaataggcgccgcgttcgcccataaactcgcgggcgtgggaaataaagccacccgaggagggacgatacaggctcagttcagccagggcgcgcagcatcatataggctacggcgccacagattgcatagacaatggctaccgagggcccgccctcggagatacgtccggaagccccaaaaaacaggccggacccgatggccccgcccagcgcaatcatgcgcatgtggcgagactttaaccctttgcggtatccgacatcggatttatcgcggtgagaggcagtccccgcggccgacggttgagtttcgctcattagatttctcctaagttttacctttttgtactcgataacagagcacatagggagtataggtgaggcgcgcgccagactttaaaggcagtcagcatttggaatcgcgcatccagcaactaactatttaggtaaaagcgtcctcggtaacggtagactaaaatcgtaaccgtgactggcgtaggtgggataccaccggggagcaagttgttaatcagtcgctcgcctgggctgattcagcactataaataaggaaaagtcaatgggagataaacttcttatccgatccatttcgcaagtggatcccgaaatcgcagcagttttaaaccaagagttagagcggcaacgcggcaccttggaaatgattgcttctgaaaactttgtgccgcgtgcagtattgcaggcgcaaggatctgtccttaccaataaatatgcggaaggctacccggggcgccgctattacggaggatgtgaagcggtagatgtggccgagaatctggctcgcgaccgggctaaggaagtattttctgccgagttcgccaatgtgcagccccattcgggtgcccaagccaatgcggcagtcctatcggcgctggctcagccgggggataccattatgggcttggcgctagatcatggcgggcaccttactcacggcatgaaaatcaatttctccggcaagctctataacgccaccgcctatcaggtggataaggaaagcagctgggtggatatggatcaagtccgtgacgcggccttaaagtaccgcccgaaagtgattatcgctggctggtcggcctatccccgtcaggaagactttaaggccttccgggaaatcgcggacgaggtgggcgcctatttgtggacggatatggcgcactttgcggggctggtagctgcggggttgcatccgaacccggtgccttattcggatgtggtgtctacgaccgtacataaaactttgggcggaccgcgttccgggatgattctgtcgcgcgataaagaactgggcaagaaaattaattctgcggttttccccggtcagcagggcgggcccttgatgcacgtggtggcggcgaaagcagtcgcgatgaagattgcaggcagcgaagaatttaaagaacggcaaaagcgcactttagagggcgcgaaagtgctggctaaacggctaacccaaccggacgtggccgaatgcgggatttccctattgactggcggcaccgatgtgcacctggtgatggtggatctgcgaaactcgtccctagatggtcagcagggtgaagatttgctgcacgagtccgggattaccattaaccgcaacacggtacctttcgatccgcgtcctccccgggtaggctccgggctgcgtatcggtaccccggcgctggctactcgcggtttcggaaagaaagagttcaccgaggtatccgagattattgccggagttttggtggatgcttgcaaggggaaagttgacacctccagctatcgcgaacgggtgaagaccctgattaaacgcttccccctctacttggggcttaaccaggttgcctagagcaaaatagataagtgcagggtggcgcgggcagatcggcaaggtctgcccgcgtcctcaagctaaggagaaaaaatgcgtaaaggatggagcggagacgcgattttgctggacggggcagcgcgggctcggcaactgaaagaacaaatgcggcagcaggtagaacgcctgcatcagcaggggattaagccgggactgggcaccattttagtgggttccgacccgggctcggtttcctatgtggcaggtaaacaccgcgactgtgccgaggtgggtatcgactcgattcgggtggaactgccagagactgcttccactgcccaggttttagccgagattgaaaaactaaacgaaaatcccgcctgtaccggttatattgtgcagttgccgctgccacgccaagtcgatgtgaaccaggtgctagaagcaatcgaccctgataaggatgctgacggattgcaccccatgaacctgggacgcctagtgctgcgggtcaatgagccggtaacctccccgctgccttgcaccccgcgagcctgtatcgatttgctgcagcaataccaggtgcctttaaacggcgcgcacgtatgcgtagtaggacgcggaaccaccgtggggcgctccttgcccttaatgctcacccgcagagagattaacgccaccgtcacctgctgccacaccggaacccgggatttagctgcgcaaacccgccaagcggacgtgattgtggcctgcgctggatcagcgggaattattaaacccgagatggtcaaagaaggggcagcagtcctggatgtaggagtatcacgcggcgccgtcaacccggaaaccgggaaagcccgcctagagggcgatgtggctgacggggtagataaagtggcagcttggctctcgccgaaccccggaggaatcggtccgatgacgcgggcgaatctgctactcaacgtggtggaaaccgctatccgtcatgccggttaagtgaggaatagcctatgcgtttgcggaacctttcgattcctttagccctggccgctaccctcgccctcaccctgggtggctgctcttcttcgccgaaagctgcctccaacgcgaaacctgcggccgtagctaaaacgagcggagtgttttgcctggtagagaagaagaagtttgaagatatgcgcgcggcggcactcagcaaagctatggaggcggcgctggcgaaaccggaaaataataaaacggtgaagccggaaaatatcagcgtggagaaaacctcgcagattagtggccagctaaagaaaaagaagtgcaacaatgtgctttctttagagccggggttcgcgccagaaatgttgcggatcgctaaaagtaatgcagacatagactttgcgattatgggagcgcttgggcaggcgaaatcgctacctaatgcgaccggtattgattttgatttgcggcaacccgcgttcttagctgggtatgcggctgccggagttactaagagtggccaggtggcggcagttagcgatttaccgcgagaggataccgataagaatccgggcagcgcccttggaaaagatccggtttctgcttgggcaagcgcgtttcggctgggggtcgaatactataaccagttcaaaggttcggggattaagttttcctattgggaacaaagcaccggcgggccgctgcgggtaaaaagcgctgagctgcatcagcagttactgaaactagccgatgaaaaggttgatgttattttcgtggtggctaatccggaagaaaccggggcggtagcggagctggcggctaaagatgcggcagctgtctggacgggacaagacctggcagccagcgctcccgatttgaaagcaaacgtgctcacctcggcggtcattgatgcctccgggtgtgcgaaacagctgctgcaacagcttaaaaccggatctatttccggcattgactaccggggaactctaaagaattccggggttaaactggctggttggggcgattatgctcccaggttttctgatagcctcaccgcggaactggcgggaatccgcagccagattgatagcggaaaaatagatataacgaaacttgagacccatcgcggctaaatgaaaacgcaaaataaaggggaaaaatgctgaaggttgccacagttaatgtgaacgggatccgggcggcgttccgtaaaggaatggatacctggctggagcaggcggagccggatgtagtgctggctcaggaggtgcgtgcgagcgaagaaatcacctcggaactttttggggatgactggcaggtagcggtgaacgcttcgcagctaaaagggcgcgcgggagtagcagtcgccgtccgtaaatcttcgccttggcacctagcggaatcagaggccgatacggttccggtggaagtcccccaagatggagggcgttggttagaggcagttttggctcgggaaaatgaatccggggaagaggatgcgcgtgtgcgagtaatctccgcgtattttcattccggggaagtgggaactgaaaaacaagaccataaaatggcacacctagagcggatcggggaacgtctggagcacttactgcccgcagactccgcctcggaaaataaagagccgttagtgctggtagctggggatttcaatgtggtgcataccgagcgggatattaagaactggaaaccgaaccacaataaacgcgccggagtgttagacgaggaaatcgctttcctagatcgctggcgtgaccaaggctgggttgacgtggtgcgcaaccttgcgggtgaggtgcaaggaccgtattcctggtggtcatggcggggtaaagccttcgataatgatgccgggtggcgcatcgactatcagttcgcgaccccgcagttggcgcagttggcgcgcagtcaacaagttgaccgctccgaggcctatgaccagcgcttttctgaccatgcgccggtggttgttacctacgaaatttaaagccgcgcctaccagtaatatccctggcaggcgcggcctaatacagttactgcttacttaccggctttcgggtgagtcatatcggcaacatttagagctttatctaaatcttcctcgctgatttcgccgcgctcaacaaatcccagatccagagcagattcctttacggtcatcttctctttcaccgcgtgtttagcgatcttagcggcattttcataaccgatgtaacggttcagcggagtcacaatcgaagccgaagattctgccagctccaggcagcgctccgggttagcaacgattccatctacgcagcgctccgccagcagaccggcaaccgctcccagacagttaatcgactctagcaggtcaatcgccataactggcagcatcaccaacaggtcgaagttgccttgggcacccgcgaaagcaatcgtctgatcattgccgatgacctgggcagctacctgcacggtggcctccggtaataccgggttaatcttgccgggcataattgaagatccgggctgcagatccggcaaagtgatttcgcccagaccgcagcgcggtcccgaggatgcccaccgcaaatcgttagcaatctttacgaaggaaactgctactacccgcagcgccccggacatttctaccagggagtcttgagcggcctgtgcctcgaaatggttatcggcctggcggaacggcaaatccatattctcggcgattagggcgataacccgctcggagaaaccctccggagtgttaatcccggtaccgacagcagtgccacccaaaggcagctctgccaggttcttttccgcgtcctttacccggtcaatccccttacgtacctgtgcggcataaccggagaactcttgacccagcataatcggggtggcatccatcaggtgagtgcgccccgccttaacgatattggcgaactcatcggctttcttttccaagctggtggccagctgatctaacttcgggagcaacgcgtgctcaacggcctcataggcggcaatatgaatcgaagaggggaagacgtcattagaggactgggaggcgttcacatggtcattcgggtgaactttgctgcccttaaaaccggtggccaaggtagcgactacctcgttggtgttcatattcgaggaagtcccagaacctgtctggaaaacatcaatcgggaactggtcatcatgctgaccagcgataacttcttccgcgcctttaataatggcatcgcgggtttcggaatcgataacccctagttcggcgttagcaatcgctgccgcccgcttgatttgtcctaaagccgcgatgtggtggctggagagggtacggcctgaaatcgggaaattttctaccgccctttgggtttgggctgcgtagagggcgtccttgggaacccgaacttcccccatagtgtcatgttcgatacgatattcttcgctcacgtgtagctcctttggtctttttaaaagtggttacttaccttctagcctaccggggttaggcgtcaccggcgtcctaaaaatccggagaaaacccttgaaatttggtgcaggggtgattttagaggtgaaagcaccctagactggaactatcgacagaaagcgggagcactatgagcaacgatgcctcagacgataaacccaccgaatatctgcctgggggagcaatggcgaacgcctatgttccgcgggggcggcaaagtaatcggcggattactcgacgggtagcgcaaccggaacctaatagcgtggagcaaagaaaaatagcggtaccgaatccgcccgagggtgcgccctcaactgttcctgccgccgccgctttcgaaggtcaaccacccactgaggtgattccgccagtgaaccagccctcaggcggtggggcaggcgccgcgccctatcccgctggtaataatggcgctgcacaaacccctgctacccaggttctggggggctcgggggcgacttatccagcagcgggagctgccccggttcaaaggaaatcgatcgatcctgccgccgccaccccgcaagttgattctttccctggggggattccccccgcctatgacccgcaggttgacccggaacagctgcgggaagaccaagaatacgaggaagaacgcgcagataaacggcgtttgatgaaagttgcggccattgtgactgcgattgtagccatcctggtgggggcagtggtgattattgcgatgaccatttccgctaaagaagtggtgcctgccgaacaggaaactagcccttcagagagcgtttccaccagttcttcggttcctgaaactacctataccaccaggcaaactgaggaacccactaccagcgcgcccgcacctgagcagccaagtgtgcagccgagcgccactcaaaccacccctgccgccccgcccacaacccgggcgacacccacgcaagaacctagccccaccgggggtgctgaaactcccacctctgcgccaagcccctctgccgggaactaagcaagacctcgaggtaagtatctggggagctgcagtgattaaccgcagcccgcatcccaacttggggtgctgacctcgaactattaggtggaacaaaggaaaacgccgggggttgtttgcccccggcgcgtcctcaaataaggaaactagattaatcctgggatagttatccctgcttgcgttggcgggcagccccggctgccgctgcccccacaatcccggcagtgtttcgcaactcggcgggaataatcggggtagagatatcaattaggggcaagaatttatcgtgtttgcgggatactccgccgcccactacaaacagatcgggactaaatagtttttccatttcctggtaatacttggtgaggcgtttcgcccactttttccaagacaaaccatggcgtttgcgtacggctgcggaggcccgagtttccgcgtcgtgcccgttaagctcgatatgaccgagctccgtgttgggcaccatcaccccatcaacaaagatcgcggtgccaatcccggtacccaaggtggtaaacacggtgactcccggctgctctttgaaaacgccgtactgctgctccgccaacccggcggcatcagcgtcgtttaaggttgctaccggacgtccgatggccttcgagaacacctccacggtgttctttcctacccactcttgatccaggtttgccatgaaacgaacattgcccccgggaagcggaccggggaagcacacccctaccggcacgtcctcgggaaggtcaaaatgagccaggacatccgccgccgttttggataccgcctgggaggtagccgggtagggggtgtcaatccggaaacgttcctgagcgaactctccagtttctaaatctaccggcgcacctttaatgccggatccgccgatatcgataccaaacgcgatagccattaactactccttgctaggcagggtcagaatttgcgcaccatcttcggttaccaccacagtgtgttcgaactgagctgtgcgtgagcgatccttggtgaccactgtccaaccattatgccactgttcccactcgattgtccccagagtgagcatcggttcaatagtgaacaccattcccggttccatcacggtgtcataggagggggcacaatcatagtgaggaataatcagaccggaatggaaagcttccccaacgccgtgaccagtaaagtcgcgtaccaccccgtaactaaaacgcttcgcgtaggcactgataacccgaccgataatattgatttcacgtcccggctttaccgctttaatcccgcgcatcatggcgttataggtgcgttccatcagcaggcgggattctttatctacctcgccgacactgaacatggcgcaagtatcgccgtgtaccccgtccttataggcagtgatatcgacgttaacaatatcgccttcctgcagcggcttatcatcggggattccatgacaaataacttcattcactgaggtacacagggatttcgggaaacccatatagtccaggcaagacggatatgctccctgcgcaacgatatagtcgtgaccaattttatcgagttcatcggtagttatccctggtcgcaccgctttacctacggcggcgagggcatcggcagcaatccggccggcggcacgaatcttttccacagtttccggggatttggtatcggaagcggtgattcgttccggaccatcatggaaaaggtattcgggacgctcgatttctttaggaacgtccagcctggggctaacgtttccggcttcttgatttcccagcggggcgcgttcagccagttctttggggctaagtccttgatattcattcatgcctctatcctacgcgggcgggcaaatgttccagatttacagtatttttcggctcgaggacgcaggtgaacccagtgcgtgggcgcaggtagatagggaataggggcgcagccaggtgccatggaattggaggagtgagtccgcagaggtaggcgcggaaagtcagaaaagatgcaaaactagcgaatcctgactgagaaaagactaaagagactcgcgggcaacatactgcagcagctgcccactgggggctttacccaggtcgaggtcatcgccctcgcgctgcgcgatatgcattaactcttggtaagcgagcgcccgggtatcaacttttattgaggatatggggggtcgcgaaacttggccagcgggagtatcgaagcctcccacaaccgaaccatcctggggaaccatccttccgcattcccgcaagccatgcacgattgccatcgcggtcgtatcatcaatcgcacagaacccgtcgatactgggatgcttttgcagcgcccccagcagataggaagcaatgttctcgggatcttcggggagcgccagttggatgggagtcgccattcccgtcgcttggcacaccatttgggcgaagaaataatagacagtagcggcattttcagggtattttccctgccagtgcacgaaagctaaatgacggcgattccgttttacttgggcatcgacctgaatcttagccatctggagggtaactaaactggcgggattttgccgatccttcccctgcagcaaagaatcaagaaccgttgccccacattcttttagttccccgagagtcttttcgtccagggggaacagcggtaaaacggcggcatcggttcccctaatagtagaaagtaaattatcgggatgatcttgcaggtgaactgtgcaaactacgctaattcccacctgggcaagcataattgtcatatcgcgtagcagggcggagtgatcctcgccaatatcgacagcaggcactacgatatcgacctttgtctttccagccagcgtcgccaaggtgcctcctcgattgcaagtttgattctattctacatatttccgccgtcttaatagccgctatctgcgtctaatctcttttgggcgtaaacatcgcggaaagttccgatccgcggtcttaaattacccccgaatttgcttggcaactaaagtgtaagacaaacgagagaacaaacatttaagaaaggtgaacctgtgtctgacgcgaccacacctatctccccgctagatcaagagggaattgcccgggcagttgcggcggcggaagccgatttttctactgccggctcgctagaagaattaaagagggcgcgcggagctcacctgggtgataacgcgccgattatcctggctaaccgggagattcgtaacctcgataagaaggataaagcccaggcgggaaagaatcttggcggtgccaagaaacagttgcatgccgcctatgaccagcggctaaccgccctcgagaaagaaaaagaagcccaaaccctggcggcggaggcactggatgtcacccaggtggcgcagcgctacccgcaaggtgcgcgccatcccctcgaaaccctgatggaagatatttctgactttttcgtttctatgggttgggaaatcgcggaaggcccggaagtcgaacacgaatggttcaactttgattccctgaacatcgacccggatcacccggcgcggcaagaacaggacaccctttatgtagatggtcgctctttggggggagacgctgcaggggacggcaacctggtgctgcgcactcacacttcgccagtgcaggcacgagtgatgctttcgcggggagtgccggtatatattgcttgccccgggaaagttttccgcgccgatgagcttgacgctacccacactccggtgtttcaccaggtagaagggctggcagtcgataagggtttgactatggcggatctgaaaggcaccctggatcatttcgcacaatccatgttcgggatggaagccaaaacccggctgcgtccctccttcttccccttcactgagcccagcgcagaaatggatttgtggttcccgcaaaagaaaggcggacccggctggatcgaatggggtggctgcggcatggtcaacccgagtgtgctggtagcctgcggaatcgacccgaatgtgtattccgggttcgccttcgggatgggggttgaacgcaccttgatgctgcggcacggaatcaccgatatgcacgatattgtcgagggcgacgtgcgattttctaaacagttcggcactaccggaaggggaaactagcaatgccatttgtagcgcttgattggctaaaagatcacgtcgaggtagtgccaggcacggatatcaaacagctttcaaccgacctggtgaaggtgggtttggaagaggaagctattcatccggccgcggtaatcggccctttggtggcggggaaagttttgaccttggatgccaaagaacaatccaatgggaaagtcattaactattgccgagtagatgtgggtaagtttaacgaccgtcccggggaaggaaaagagccctccgagctggccagtcggggaattatttgcggcgcccacaactttaaagttggagatttagtagtggtatcgctgccgggcgcagttttgcccggtgatttccagattgctgcccgtaaaacctatggacatatttccgacgggatgatttgctcccagcgggaactagggattggtgaagaccatgacggaattatcgtcctggagcagttactgccggaaaaggcagcagccggggagctgcccgctcccggagaatcggtaatcgaactgctgggattaggggaagaaaccctagaaatcaatatcacccccgatcgcggttactgtttcgcaatgcgcggggtagggcgcgaatacgcccattccaccggggctaaattcactgacctggggctggcagaaaatctgccttccgggtcagtaccggcggcaaccgaagatgggttcgcggttaaagtagcagatgaggctccgattaacagcaaggtcgggtgtgaccggtttgtgactcgcattgtgaccggcattgatgcgcaggctgcaactccggactggatggtgcgccgcctagaacaggcaggaatgcgttccatttctttggcggtagatgccaccaactatgtgatgctggatttggggcaacccctacacgcctatgacctggataaagtgtgcgggccgatcgtagtccgccgggcgaaagctggcgaaaagctaactaccctcgatgaggtagaacgcgccctagatcccgaagatttactgattaccgactccccggagggcgtagaaggctcccgggtgttgggcttggccggagtaatgggaggcgcctccaccgaggtgactgccgataccgtaaacgtgctggttgaggcagcgcatttccatcctacttctattgcgcgtactgcccggcgtcataaactgccttccgaagcctctaaacgttttgaacgcggcgtggacttcgaggtatctccggtagctgcccaacgggtagtagatattttggttgaatatggcggaggcaccgacagtggacgggtcagcgacctcaatcacacggagccttttgccgaaatcgtgatgccgctgcatgaaccggcacggctaaccggggtggaatacgaccaggaaaccatcactcggctgctaaaagaggtcgggtgtgaagtgcgggtagaagagggcaaagtgtttgcccaaccgccttcttggcgtcccgatctgaccggaccggcacacctggtagaagaaattgcccggctggccggctatgacactattccttcgcggcgcccgcgcccgattgccggacgcggatacacccccaagcagcgagctcgccgggatgtagctcgcgccctggcgcaaggtggcctggtgcaggtgctttcttatccctttatttccgaggatgtttttgacaacgaactcttcggggaaaaggatgtgcggcgtcaggcggtgcgggttgctaatccgctcgcggacgatcagccgttactgcgcacttcgctgctagatactttgctaggggttgcccggcgcaatattgcccgcggcaatgagcaatgcgcgattttcgagactggtttggttactcgaggaatgggaactgaacttaccggttctttcggggtcgagcaaaaaccggatccggaccagcagcgcgccctcgaaaaaggagttccttaccagcccgaacatattgccggtgtgctagtagggcaggcggaactgaccggtgcgctgggagcgggacgctcctatgattgggcggacgcggtggagttcgtgactacggtggcgcagactttggcggtgccgatgcgtctgcaaggcaaggatggacgtcaacgcctagctaaagacaatatgatgggggagcctggctcgccggaggcagtcgcgcccttccatccggggcgttgcgcccggatcgtagtgcggggggcttgcgtcggtttggcagggcagctgcacccggcagtttgccgcaacttcgggttgccggaatcagcttgcgctttcgagattgatttcgagaagttcaccgaagccatgccgaagaaagacttgcaggtgaagccagtttcgtccttcccgcccgcgaaagaagatatcgcgttggtggtggatgcggatattcccgcagctgacgtgcaacaggtgatcgagaaacaggcgggagacgtgctggaggaagtacgtcttttcgatgttttcagtggggaccagctgggggcgggcaagaagtcgctggcgttctcggtgaagattcgctctggggaaggcacgctgagtgccggtgagattcaggcggtacgcacccggattatcaaggctacggctaagaagttcaaggcaactttgcgcgcctagagatagtgcgcttttgtgggagagagctgcgaattcgccctcgacgctgaaagaggtaggcgtggagggagagtttgagggaatcgaggaatcgagaagcgcatgggtgccccgtgcgggacttgaacccgcgacccacgaattatgagttcgctgctactaaccaactgagctaacggggcgaatctagcctaccggatggcgggcggattatttaatttcgtttagggtggataacgtgatcaacattgtgcaacgactgaaaggtcgcaaagttccagatgcggtgaaaggcgtcctcacctcctccgataggattttcgatttcctaaaggtgaccgaggatcgtttcctggtggtgaccatgcaggcattaatggacgtggaatcagcgcaggtgaaatcgcgttttggttgggatgaagtttctcacgcccgttgggatagtgaggtcggcacgttgcggattgtgttccaccagggcgaagacctggtgcttaccccgctcgaagcgcctaaacacaacttcatggacatcatccgggaggctctcagcgaggcgcaggtgtttgccaccccgctggaactgccttccggtcagagagttagcgcacagatcctgcgtgacgataaccgcaatttacgtttgcatccgccaatatctagctttgaaaacccagatgaccagcagtatttacgttcggtagtgcgcgaatgggaacagaaattggggatagttctcgacttggaagattaggaacttttcgccctctcaaggtaggcttacattcgtcgatcccccatagctcaacggtagagcattcgactgttaatcgaagggttactggttcgaatccagttgggggagctcaaaacctcagtgctttaggcactgaggttttttattttatcgctggtagaagtgtgtttcaagtctgatatctggatggtgattagccctctagtagcgtcagtgagacctacgtccgttggtgtctatgaatctacctgataaggttttaaccgaatgtcctggtgattctaatcaccgttagggcgctccaaatttcaaagttgagggttgagataggtcattgaggggtgacctaaaggagatttttacgcaatgaagcagcatgtcacaaaactaactgccaccggattcgctttagcgttggcgggggtgctaccagctacggggattgcgcaagcggcacccgagcctagcaatcccactaatcccaccgggggtgagcagcaaaaccagcagaccaatccgaaagtaaaaacggcaaacgagctggaggcagcgaagaaagcggcccagcaaagtgcggcgaaggcggccgaggccgatagtaaagctcaggaggcagcgcaagctgcagacaaggccgcgaaagaatctggggaaaagtctgcggccagtgaaaaggcgaagaacgacgccctcgaagccctagttaaagcgcaagcggatagcaagcaggcggcaactgacgcagctaaccagctagaaaaagctaatcagaataaaactgccgccgagggcgccgcaaagacagcaggagaagccttggctcaagccgagcaagctaaagccgacgccgataaagcggttgcagataatcccgctcccgatgccgagcagctgcaggccgccaaagataaggtagcgaaagctgagaaagataagcaggcagcagaagctaagcaggcagaggcgcaaaaggcgctatcaggggcacaagagcaggtaacaactgcggaaactaagttgcagaccgccaaggatgctcaggcgaaagcagaaaccgcgaagcaggccgctgaagccgatgtcagcgccaagcagcaaaaggttgaggaactaaagaaaaaagtcgatgatttggccggaggcgggtcagctgcgctgcaagaacaaataaaagcagctcaagaagctctagataaagctaaagccgaggtagaaaccgctaaggctcaggaacgtcagcgccaaagtgaggtagaggcggcgcaggcagcagtcaccactgcggaatccgaattgcaggcaaagcaaaaagactttgagcaggcgaagcaggctaaagccaccgctgatcaggcagtggaagcggccgctgcgcaggtaaaggcagctcaggaggagcagactaaggccgagaatgctttaactgctcgcaaaggtgagactgcggctgctgaaacggctgctaaggctgctaaagccgcgcaaactcaggcggaagcggatctggtaaaggcgcgcgaggcgaaagatcaagccgacgcggcggtaaaagccgcagaaaccgaagtagcgaatgcgcaaaaagcggtggatgaagccgctgaaaagttcaaccaaggcagcttcgggttctttaaagccatggggtcacaagccgctatcgacatcctaaataatgcccaatatgctagctacaccaaaaaaggcgaccccaatgacgccacttcgctggaaaatatgaaagtcactttcaaatggatacgggaagcaaataggctcagagctctagaggggctagctcctttgcgagttactgatttgcagatggcgatggcgcaatcgaatgccaactggtccgatactaatatggatcattcccggcagcctcacaaaaacccagatgccctgatgacaggggaaaatctatcctggggatacggagatggatcctattttgccaatccctttggggatcaagctaaatctgggaaagaaacgaaagcaaataatggaaccggttttcaatacgtgacttgttattttggagggcaatcctgttttcccgatggctggtattggggagagaagcgtaattatctttctcagcaggcgggcgagacttggaacggtaggagcaataacggagtaacagggcattacacaaaccttatcggtgattacaatgtgaccggttatgccgcaagtactgatcccaacgccaaatatcagccaacgcatagccaagttttcgctaagcaaaatacttacagtaccggggatgcttacaccgttgatgaatacgaaaaacggtttatggattactacaactcggtgactccggagggcgcaaagcagaagctagcggacgcggaagcgaagctggcggacttgcaggctaaggccaaagctgcaggcgaaaaagtcacggcaggcgaaaaggctgtaaccgacgctcaggcagaaaccaaagccaaggatgcggcctggaaagctgcccaaaacacagaagctaacgccgctgcggcagtcgaaagtgccaaacaaaaggtcaaggaggctgaaaaccagaagacagcggccgaggaaacggcaaaggcaaaagagcaggccgtgcaggtagctacagaagccgctactgccgctgagggcgccctcgcgaatgccaaaaccaaggtagcagacgcgcagaaagccctggaggcagcgcagcagaaggtcaaagacaaagaagccgtgcaagcggaaaaacagaaagcgctagatgagatcacggttgatgatgccttggcagcggcgcaaaaggagttagcccaggctcagcaagacctagccgcagcgaacgatgaagctcaagcagctagcacccagctggacacggcaacccaggcgcagcagcaggcacaggcagcgaaagaagcagcagttaaggctgtggaggaggccaacaccgcaaaccagcaggctgcggcggcagtcagccaggctgaaaatgcgcgtgcggccgcacaagcggaactaaatccgctagccgaacagcagatcgcccacgatcagctggtagccaaggcagaaaaggcagctcaagacctgcagcaggtgaaaactgccgccgacaaagcaaataaagagctggaagtggtaaccaaagttgccaccgacctgcaaaatgagcagcaagctaagcaagcgctggcggataaactgggggctatcaaggggcagaacgccttggagaaaggtctggacgctaccgatagcgacctagataatctgggattgcccgccctctttaatgcctatcccagtaccgttgccgctgctgagaaggctcagcaagaggcagaccggctagcggggttggctaagaccgcgcgggaagtccaggaggaggccgccgaggttaatcggcaagcccaagcccagctggcagccgcgcaggctgaatatggtctttaccatcaggtgcaagcagccacttccattaaccaggccagttcgtttgcccctggagataccttaaaggtgcatttcacgggattcagtcccgggagttcgaaccgggtaatcatgcattcgaccgtggttgacctgggagtacatccggcaataggcaaaggcgagttctatgtatccgtgcgagtaccaaaggagttgggtacccacaccattaccgccactaacgaatggggcgaaagcgccagcttccaattccaagtgggcgagaaacaatcaacgaatgcagtaggaaaaccaaaggctaacgccggtaggcaagtagcaggtgaacaaatgccagtaaccggggtatctatgacttccctggtggcattgaactcgctagcggtaattaccggagtggggctggtagccgccagtcgccgtcgccgtactcaagaaatctagaattaagatatctgccagtatttaaaaatcgtccccgggctgacaaagtccggggacgattttattcagttaactaaccggaaaataggtcgccaaaaaacgagtgataaaaaataggtattatttagaacctatttgagtaaccaggtagctagcgcttctttgtccatgatgtttccgaagtaggaagtgctggcagcgtcaggtttgaccgcaacaaaccccgtcacggttccaccgggttttaaggatccgtcacctaggggttcttcgtccagaaccggaatttcgggatctttcatattcgctgaatcagacgtttgcttccagtcaaactcgttataatctactggttcagacccggtatttttgtaggtaactgtaacgagaagatattttttatcagcctgatcagtcttttccgctttagaatctactgatacctgtaaaccattgtccaaagtaaccgctttcccgatagccagcttgctgttatctgccttctgttcagctttcttggaatcaccggcagcggctttgccctcctagaatccgcctgtcgcacagttggcgaatgggggggctgttagtctttacccatggaacatgaactccccaaacctaaccccaaacctaagctggattcaccagaaaaaccggagaggcccgcaccagaacccgcggggatagttaatgcgatagatgctcaggacgtggtgaaactctacggcaataaccttgccttagaccatctttatctgcaaataccggctggctcatttttcgggctggtaggtcctaatggggctggaaaatccacgtttctgtctatcgctaccggtcttttagaacccgacagaggcacagttttcattaatggcatcagtatgtgggatgaacccgtagcggcaaagggagcgttgggggtattacctgatgggatgcatatgtttgaccgtctcagcgggattgaacacttaacatttgtcgctcagctgcgcggtcttgataaacagagtgcaattcagcgctcccgttcacttttgcaaacatttgaactgccgctagataaaaagaaaacgataagcgaatactcaaccggtatgcgcaagaaaatcggtttagctttagcgctggtaacctccccgcgcctagtggttttggacgaaccttttgaagcggtcgatccggtttcggcaaacaccctacaacaagtgttaaaagaatatgtgaagcgagggggaacagtagtgttatcttcccacgtgatggcgaccgtggaatcattatgtacccatgtggcagtgattaatcagggtcgtattctggtgtccggaaccaccgaagaagtcgcggcagggcaagacctcaactcgcgcttcctacagttggtagggggacatcagcaatgcgaaggagacctgtcatggttgggacgctaatccggttaaacctgcgtttgcaaaccaaacagttcactaaacagtggtggcgaatagtcctcggtgtcctagctatcatctacgtggcatttatattacttggggtggcaatcggcttttggcaagcaggtcgcgcggggcttaccgctccgattcaaatctattacgcgctgcttatcgtcctgatttggatgatgatggtatcggcatcggtagctggtgaacaaagcctgaccccccaggcgttaagcccctatatcggccctacccggcgctcagcctacggattgctcgcggctaatatcgtcagtgtttcctcttgtatagttttcgttatctacgaggtgtcgctggcggggtggctagctgccggtagccttggtgcgagtgtgctcaccgttctaagtgggctgctaggggtatttttgattgcagcactcactcagatattgcaaactcggctggtgtcgcgattaactgccaagcgcgctagctctcgccagattcttaccggtatcggtatgctggtgctaatcgccttgggatacttcctggtgactatgattcagcattggtttgctgatagcggtggcgcaaccgcgtttttcccgctgctggtgcaaaagctgaccggaagtacagcacagattttttggtatttcttggcacttactccgcttgctcctttcctgcttgcccctttcgtgatggctcatttttattgggggctggcgctctccctcgcctctacctgcttttatggggttctaatcttgagggcgtggccgaaggtttttgcgaatgctctaatggggcgggggcaggttttagcggaggtatcccctgccaaaaacttagctgcgtcctttaacgaaaatggtgaggacgtctggaggattcctgtgttagctcgggtgttacccctgtcgccggtaggacaaatccattgggcaagaataagttattaccagagaaaagacccgcgccaaattatttccctatcttcgatactgtatgtggcagttatttttgggattatgttgtgggcaaaccatccctcgggagaaatggttttttgggcgttaaacggaactatcctgctggtagcggtgacggccgcaactgctctgctgaatatgtggtccaatgattcttccgcctactggtatcagattattgccggggttgccggtaaaactgacagaaccgtgcgtgttggggttcttgctagctatcaacttccggtaatggtggcgattactttgatttttggtttagcgctgaaaatggacacctccgcgattttgaaatctgtctttttagcctgctgctacctgttagtgggtttaggtgcaaattctttgatttctacggtagttactatccccggtccggcgccgggacagtcggctctgcgtaataattcgggaggaagtgggaaatctgtgctggctaccatggtctcctcaatggcggcgttattgctgtgtgctctcccttcgggattaattgtgttggtctgcgtccttttggatacctcttgggtttcgctcttgatagctgccctcattaccgctgcggtgctggtggggggaatctacggcggcggaaaactgttagaacgcttccaggtgcgtaatctacgccgagtgatggcgtggccaaaacatatatatagcggggagtaaactaataacgcccagataggcgtgatttgccgcgtatggggtggcgaaacttgggttagtgcctaaaaattttcgcgtagttttctgtcactttggcattaaaactggtgagaagcgctaacaaccaccctaaaaactgacataaataggggtcaaaactttgtctgtcggcggagatggagggattcgaaccctcgaggggctatccaccccaactcccttagcaggggagcgcactaggccactatgcgacatctccaatgtcaaagcacctccatagtttaacggacagtaagggagtgaccaaaaacatcgtgcgtgcatctggtcacttgctagccggtgttccaagtgtcctagccggcaaaggaaagcggtattggctgcaaaaatagttattttgattcaagtgtcgcgacctctcctcgcttccagggttcaagagccccaacgagtgaagaagccaaactgcctaacataacgtatatgcacagcaacagccagcctcccgatcagcaatcgcaagggggagcgacaatgcctgcgccctcgccgcgatcagcgctaaagcaagccgcgcggctaaccggaccggtgggcatggggtacctgccgctgggaatcgctttcggtgcattcgcggtcacccaaggattccccatttggctggcaatattatcggctgccattatctatgccggctctatggaatttacagcggtgtccctaatcctgggtggcattgatttcttccaaatcgccctcaccaccctgttcgtaaattttcggcatgtgttttacgggttaagtttcccgctacgaaaaataaaatctgcccccgcccgcctgtacgcaatccactcgctaaccgatgaagcctatgccctcaacgcctcgctcctgacagataagcgcctaaccgggccggtagtgctctcaatcaatctgctctgtcacctttattgggtgggcggggtaaccgtgggtgccttcgtgggcaaagctctacccttcgacaccgatttcttagggttcgccctgcccgccctgttcgtcaccttggcaatagaggcctaccggcaaagcgactatccgctactgggattagccgcgctgatctgcggtttaatcggcgcgatttggtgtggaaaatatatgctgatcaccgcgctttcgctgtttaccgtggtggttttgctgcattgcgcctgggtaatgcgccgcagtccttccgggaaagagggcgcctgaaatgaaccctgcaacctatccttacgccctgggcgctattgccgtgatctgggcagttacctacgctttgcgcgctttccccttcgtggcgctccgcgggaaggcagaatcgcctctcgtgcgcctcatagctaccagtatgccgctgggagtgatggtaatcctggtggtttatgcgctgatggatacggactttcatgcgctcagctcctgggtgccggctgctggcggaatcctgataaccgctctcatccactggaaatgggcaaacgcgatggcatctatcgtggcaggtgtcgccacctattgggcgctaggaatgctgctgacatgagggcgcgactgggttaaaacaccggggatagctccctaaaactcgcacctaaacccgccctcgcctccgtggctacgcttaaagcgtggaaagctgcggacagtattccaagaggactagggtaaataagcaaggtttttgattgccaggtttgaggaggaagatttgtcgcgcacattcacctccttcaaataccacaactatcggctctggtggatgtccaatatctttgcctccaccggcctgtggatgcagcgggtagcccaagactgggtggtgctgatggtgctcaccgaccaatccggattcgcagtcggggtagtcaccgcgttacagttcctgccccaattgttgctgtcgatacctgccggaatggtggcggaccgttttaatcggcgccgcatcatccaaatctgtcaatgcatagtcgcccttagcgggctcacaaccgggattttgctgctcacgggagtggccgccctctggcaaatctatataatcgccctgataactggggttgccgattgcctaacctccccggcacggcaagccttcgtctccgaactggtaactaaagaagaccttcccaatgcggtaggtctaaattcgaccgcctttaactcggcgcgcttgatcgggccaggtttggccgggttcatgatcgccgggatcggaccgggctgggtttttatcgccaactgcgtgctgtttatcgtgccggttctgggtctggcgtttatggacaccaacaggctgtttagccgggaaaaaacctcccgcacccagggaatgatgcgcgaagggctgcgctacgtgcaaaaccggaccgacattaaagccatcatcgcgattctcacggtagtgggagccctggggatgaacttccagctcacccaagcggtaatggccacccgagtgttcggtaaaggtgcaggtgaatacggtctactagggtcgattatggcgatcggtgccttggcgggagctctacaagctgcgcggcggcgtcagccacgcgtttttaccgtggttctatcagccgtcctatttggaatcttagagggcgccctcgcactggctcccacctacgaaatcttcgccctcctgctgattcccaccggattcgtgatgctgaacctgcttaccagcgctaacgccactatccaagtttctaccgatgaagaaatcagaggaagagtgctgtccatctatttcctcttcttcctgggaaccaccccgattggggcgccgataatcggttgggtagccgaacattgggggccgcgttggtcactaggagtcggcgccatcgcgtccttgctggttgcgctgatagtagggatttggttatggcgacattggcaagttgatgttactgtccgcgcctcccgccccttcctcaccattgaagggccgcgcgaaagggcgatgcggcgccgtaacgagcgtgccgagcgtcagcggataatggataatcagtcacgcgacaccggaaactaagtcgcaacggacgcgcgcggtagcagataatgctgccccgccgatttcctcgccctctccacaaaaagaggatccgcttgggcagagaaaaactgaggaaaaatgcgggaaaccctcatattttcagaatcttcgtcctctgatttgggttctcctgccggttgctctttgttaacctgccagtaactttaggttgttagcttccaggtgaaagttaaaaattctcatctgaaggaagtcaatcccgtgacaaaaactgacaagcctctgcaagaagaagcaccgctggggcagctaacttttttccaaaaactagcgaaaaaagatgtgtactggcacctggctttcggcggtctgctcctgggaatcaccatttggtttatcttttgggctttcgattacgtaggggaaaccaatcaggcgttactgctgttaataaccattgtcttcgccgtgttcatggcctttaacatcggtggtaacgatgtggccaactcgtttgggacttcggtcggagccggaaccctatccatgaaacaagccctggtagtagccgctattttcgaggtgtcgggagcggtaatcgccgggggagaagtaacagacaccgtgcgttcgggaatcgtagacctatctgccatctcgaatctgcaagcgatggacttcgccctaataatgacgtcttcactgctaggagcggcagtgtggctgctcggggcaacccgcatggggtggccggtgtctaccacccactcgattgtcggcggaatcgtcggtgccgccctgaccgtgggctttaccacccacactgggggctggagcatggtgcaatggggaggtctcgggaaaattgcgatctcctggatactatctccgttgctgggtggggtagttgcctatattttgttcaaggcaattaaatcctcgatcctggtctacaatgaacgcgctgatcagcgtctacgtgaaattaagcaggaacgcgcggatctgcgtactcgccacaaggcctggttcgagcggctcaatgaaatccaacaagtttcctacaccaatgcgatggtacgcgacgccaccaccatgaatctgggcgactacgatcccaccgacctggaatctgactactttaaggaactagaacgcatcaatcgcgaaaaagatgatgtcaacgcccataaagccctggaaacttgggttccgttactggccgcatttggagcgatcattattggctccttgatgctattcaaagggttaaaaaatctggatatcaacctgtcaatgctagggaatctactgatcctggcgatgctggcagcggcagtttggatggccatattcatcctcgcgcgttccctcaaacggcgagatctttcccgctcgaccttcctgttgttctcctggatgcaggtattcactgcttccgcgtttgccttctcgcatggatcgaacgatattgccaacgccatcggccccttcatcgcggtgctagatgtgctgcgcaccaccggtatatccactgaaagtgcagttccaggcgccgtgatgcttgccttggggattgcgctgattgcgggactatggttcattggtcgctacgttattaagaccgtggggtctgggcttaccgagatgcacccggcttcaggattcgcggcagaactttctgctgcagcagtagttatgggctcttcgctgctgggtctgccggtttcctctacccacatcttgattggtgcggtactgggtatcgggattgtcaataaggcggcgaactggtcgttgatgaaacccatcgccctggcttgggtaatcaccctgccggctgcggccgtaatctccgcgattacagtcagcgtattgcgagtgattttctaaaccggaatctgaccctaatcgaccaggtacacctgaggttcgccctcaaggttgtacctggtcgaagcggttttagggcaaggtgtaaataaagaataaggctaaaaagtgcccccgagacgattcgaacgtccgacacccgctttaggagagcggtgctctatcccctgagctacgagggcgcaaggcggccgtcagcgcctcagccagtctaggataacactggttaatcaggctcaaaactgaaggagtacccatatcagctattccgggaagtgattattatcgttttcgacctcttagggcatggcaaccagggcaaaccctttagttctcgtatgctggcatcgtgagctataacccggaaacagagatgaactcaagtgagagcgccgatgaggctttggcgatggaagaagcgcctgctagcagccgtaaacagctggttgacgcggccctaagcagctggagcgccgacctagagcgcactattgcagaagaaactgcctcggcatacctagagctatctgccgcccaccccggtggtttggcgcagctttacggaggacgccccacccggctgtccaacctggtgcgggaaccgcgcgccctctcacattgccggattcgggcgcgggaagtgctttctgcctcccgtgaccgtcaggctcgttacggcagcggaccggtttacctggcaatcggcaccgcctcttggcggcagggaggaaccctgggagccgcttgggatcgggcatctagccaagccgcgtcctcggcaacgaaaatgtcggcggcggctgcctcggcgctaagcgcggaaaatactcctagtaccagtgaagatacctccgaagaaagggaggaaaataacgcggtctatgatattgaaaaaatacatgccagcgagccgcgcactatcaccggaccggctctgctctgcccggtggaactatcgctaactgcggatgaggacgtgctgctcaccttagataatgtggtcgaagtgtggccaccgctagaagcggcactgcgggaaaaaggggaacaggcagaaattgtttccattctgcaaggactgcaggcagatgaggcattcagtcccaccaacgccctctccgagttgcggcgcctgggagtgctgcacctgctgggatttgacctctacgattcgctcaccgtgggacaatacttgcatcccctgtctaacctggtaaaagactatgctctcaatcaagaattattagaacaatccgaggtaactgcggcgctttgcggagacgtagaggccgccggagcggtgctatcgcccctaccagaaccggtattaagtgaccgtgaccccgttgccgaacatggagtgggcgaccttgatcccgcgcaacacaacatcctagatgcggtggcatccggggcaaatctgctgctagatgcgcctccggaatctgaaatcacctccacagtgactgcgattctcgcagatgctgccagtgccgggcgcactatcgcctatgtgccgggggcacggcgccgcctgcagcaggtactctccgccctggatcgcttgggcctagaaggcctcaccctggatctatcgaaccgtagccgctggaacgatatggtgccggccaagctcctagaatcgttgaactccccgatagagacgattgacacggaggaagctgaagccaccaataagatgcgccacgaactgacgcaagtgcgctcccagctgggtggatatatggagcagctgcatcgtaaacgcgatccgtggcaggtatctgcctatgacgctttgcaggtactggcagacctaacttccatgaaacccgggccgcgcaccaaagtacggttcgatctagaaactttgcatcgtatctccgcagatggagccaaacgtgcccaagaactactcgcggaagccgaaaaagaagggatcttcgcgcagacccgggcaactaacccttggcattcggtggtagtttcttccccggaaatggttgataccgcaattgagggtgtcagccaactatcggggcgcaccctgccccaggtgcgggcagatattgatcgcacacaaaaggaaaccgggctgcggcacgccgccaccctcaaccagtggcatgaccagctgcgaatgctagatggtttacgcgaagccatggacgtgttcaagccccagatctttgagcgttccgccgccgatatggtgattgctaccgcctctaagaaatggcgtaaagaacgcgccctcaatatgaaaaattcccagcggcgccgcctgattaaacaggcaaaagacctggtacgtccaggacgccgggtagaggatctgcatcgcgaactaattcgggtacagcagcaacgccgtatttggcgtgaatactctcccggtgggggctggccggttctgcctggtcgcctcgaccagatgcaaaaggccgaggaggcgctgcgcactcatatatcgcgcttgcaaccgttcttctctaccgggtttggggatctggcggaaatgccgctcgatgagctagtcagtttgatggacagcctatctgctgatgaaaagggcgctgagcgactaccgcaacgggtgtccctgctaaaagaactccatgatgtagggctagatgaactggtcgatgacctgcgtgaaaggcgagttccccgcgagttactgcgcaccgaactagatttggcctggtgggcgtcggcattggcagaaatgctacacctagatgaccggctggctcattttgatggggagcatttacgcgaactttccacgcggctgcgcgagcttgacctgcagcaagtgaactctttgtctgggcaagttttgcggcaggtgcgccgccagatagcgaaactggtggattcccaaagcgaaaatgtttctgacctggagcgagtgttaaccgaggcgcggacggatctgccggaagtcattgggcagttcccgattgtcgagcggctgcgtcctatccgggcaattcctccggtattagtaccccagattttgggaaatgatcatcctgtggatttgttggtactggacggcatagaaaatgcggacttggcagaagttatccccgcgattgctcgggcgaaacaagtagtagtagtaggcgatgtgcgccgcagtgaacagggaaccatctctgattttgcgggaatcttctcgcaactgaccgcgcctcctacccgctcaagagttaacgaatgggtggctgccttcctggcagaccacgattacggccgggacgtgatgccggtgaccgtaccgcgtccctcccgtccagtaactttgaccgtggtcgatgggaggggaatgcccgctcccggagcccaatgcgttgaaacctcctctcaagaggtcgatgaggtagtgcgccaggtttgcttgcacgcagaggtacaacccaaagaatctttaggggtggtggccttaaccgtaaagcacgcccaacgaatcagtgccgcgattatgagcgaagttgcccgtaaccctaaactagataaattcttgagccgcaaccaggaagaacctttcgtaatcgtagatgcggcgggagcggccggtttgcgccgcgaccacgtgattttatcggtgggattcgcgaaaacaccccatggaaaggtattgcatgacttcggagtaatctccgcgattgaaggcacggcattgctggtagacgcggtttcgatggtgagaaaggagctatcgctgatttcttcgatggctcccgaggctatagatccgcagcgtctgcataccgccggatctaagatgctttacgacttactgcaagccgcgcgcgccgaggcacagaccgtaggtccggtagaggcagcgcaggcgatggacgaggaagaatcgcagcccgatcgcctcctactagacctcgcggaacgcctctactcagtgggattaaccgtaattccgaacctgggacccaagaatgggatgcggatcccgttagcgattggacaccccgactatccagatgaactactggtagcggtgctcactgataatcccgattatgtggccgaaaaatctttgcggcggcgcgaacggcattggccggatcgcctcaaagaatacggttgggtagtcagcgtagtgtactcgacagcagtattcatggatcctgccgcgcaggcacaacggctgcttgacctggtagttgacgtggtagaagaacgtaagaaagcgcaggcaaggcggcaggcagcggcggcacccgcacctgcaccggcacccgagccggcttcagcgccacttcctgcaagttcaccagcgccacaggcagctgtccgcgaaaaagagcgtcccgtatcccgtccgagactttctcggggactaccgctgaccgcctacggtgatgaccagttagatgacctgctcgcttggattcgttctgacggtaagaatcgatccgcagaggaagaggtagatttactctttggtgaattaggtttgcgccgcagggatacccaggtagaaacgattctgaagaacgtagtcacccggaaccggtaaccgtgaaacaccccgcggcccgtacctactcccaggtggatttgcagcgcatccaggaaggtaaacccacttcatggcaggaaagcgcggatccaagcccggatcaaggtgggcagcaagaaactgctaaccagcgccccgaggtggattacctatccgaactcccgccccattggcgcgaacataaccagtagccctcatttgggttttttcggtaacaccggggtacgcgcgggagaagtttttcctcctgcccaagaattcggaaaacgtagcggcgttttccgaattcttatgcccaccgcgcctactcggataaaacttctcccccgcgcaagggtcgcggccggtaaaagatacgagaggggcttgaccggcgaagccggtcacggggtccccggagtgcttttaccgagccagacccgtgacgaggttagctattttgggcggaagatttttcggattgcagcaggtcgcggatttcggttagcagttctacctggggatctacttccggttcttctgcttcctcttcggcctttgctttagcatcgcgtatgcgcatcagcttattcatcggcacaatgatgcaggtgtaaatcgctagcgccaccagcaggaagttcactagagcggtgataattgctcccggttgcacaatggcgctgcccagatggaactctaaaacgttatcgaagttcggcttgcctaccagtccggcgatcagcgggttgatgaatttgtctacgatggcagtgactaccgctccgaaggcagcaccaataactactccaactgccaggtcgatcgcatttccccgggaaataaactctttgaatccggcaatgaatccggttttttctgcactcattagtcctcatttagttggttttatcctgtcctggctaattgtagcggttcagccttgctagcttgaactagcagtgctgcttgctgaggttgcaccgccacctcgatagttgctgctttttgtccgccagtcagtgacccgctggcggcactgaccgataagactctggcagttatctgtgtggagagtcccttactctccgacaatttgttttctgcctcctggctaccttcgggagggttatcgccgctagtagcggtgtcattgtctggggatgccgcttgatcagtaggagagtttccgagaaagaaaattacttcatccccggcgctggccaagccctgatcactttctcgcaggggcagcgccaatatcacttgccctttataagattctcgcgcaaatggggaggaggagaataacgctggaaatagggcagtgccggtagcaatcggaaccgccgtccgctgcccaactacttgggaaactttttgatacgcctggggaggtagcgccgctactggaatcgatttaactgccagttgatcaggggtaataactgtgccgggggcaatggtagtggcagatactatcatcggtttggtggcaatctgaggcagcactattcgcagcaaagtgactatcactgccactgccgcggctagggcgatggtgcgtcgccagcgccatagaaactctcgcatagctaaattctcaccagttttctggcagtcaaagaaagcctagataatccgccggaaaacattttggttatttccctctggggacaggcaaagcactacctggaataaccattaatcgaagggttattgtcaccctttgcaaacaagtaaaacccgggaaagcttagccacgaagccagccgccacaacaggccactaaggaccaaaagagctcagactgctcctcgccgcccacctccggcagcgccaccgagctagtcgctgcctagtttttgtagccgcccttccggagtcagcacctggtcaacgagctggtcgtgaggctcccgaggcagtgtccctgcctgcagcacctccccctcatgcaccagagcaatcagctggggacgggtagcacaagtcgggtcacagtgcgctaaggcctggtcgtaccagccggctccccgccctaagcgcactcccgtcctatccaccgctaaggcaggtaagaaaataaatctcagccccaacttcgctagctcatcgcatagcatttccctagcaagcagaggagggtgcgggttgaaacggcggtagagggcgcgagtgtgctgcaccggatccagttccccccaccgtgactgctccagaccgcaaggaactatcagtttcaaaccggcagctagaatcgcttcgttgagtaagaaagtaggcacctcggtgtcgaaagaaagataactagccactacctcgccaggctttaaggaatccaaaagtggtttcgctgctgctaagacctgcgattctgcctggtggcgcagcgcgggcgaaaatgacaggcggcggcgatctaaaaacttttgtcgcagcgtccgcttgctagtcactaaatccatgaatcaatgatagacgtttacgcgtttgactccagtcggcttttcatcgttgcggctagggagcgggcaggtaacctggaaacagtactagacctcaggagggcgaatgcgcactgttgcggaacatttgaatacttgtctatctctagtggcaccgctagatccactagatgtgctgctaccagatgcagtggggtgtgtcctggccgaggacgtgagcgcgccattcgatttgccggtcaccgatcaggcaactttagatggatatgcggttcgttcccgagatatcgggggcgccgggaaaatgcgccaggtacgcctggaggtaatcgccgaggtgaaagcgggagacgcggaaccttgcaccctggtggaaaatagtgcagtccggattgcctccggggcgccgctaccagtcggagccgataccgtggttcccctggaggaaaccgaccaaggcagtgcccaagtacagatactgtccgctccgactaaagggaaaaacattatccgccgggggcaagacgtaagtgctggtaccgtgattttgcgcgcaggctcacgggtcggttctaggcaagtagcgctgctcgcgggagtagggcgtctgcgggtgactgtgcgtcctcgtcctcgggtagtgattttgtcaatcggtgacgagctgattgagccgggtgaggcgatacgagccggggcagtatttgacgctaacgggcatgcgctttcctccgcggtggaagatgcccgggcagatactttccgggtcgcggcggttcccgatgaacaaaatgccctttccgaaaccatcgaagaccagctggtacgggcagatattattatcaccaccggcggtctttcctacggcagtgccgacacggttaaagaggtgctagctcccctgggtaccgcgcgtttcgataatgtggcgatgactcccggcaaacagctcggctacggcaccgtaggggaaggcactccgattttttgcctgcctggaaacccggtagctgcccaaatcagttacgagatttttgtgcggccttgcctgcgccacctggcaggttgggaagagctttatcgcccttccctgcgggcgcgggtagatcgcgggtggcgttctccggcgggtagacgccagtttgtgccggtaaaaatcgtgggtgccccggacagcggttaccgcgcgcgcctgaccggggaacctgaagacctgttactttccaatatggccagggcaaacgcgctagcggttatccccgaggcggtcacttcggtttccgaaggcgactattttcactgcatggtgctagattagggcgctgttttgttttacagggcatctgcttctcgtctgcgtgcacgttaccgagcgcagctggataatccggtaggcctcggcctgataaaaccggggaatccgcccataaaacagctattggttcaggaaatgaacgcccgggatcatcgtttagctgcgcaggtgcgcgccgataatcactgttggttggcgccttgggaggcgtctgcggctcccgggtatcccagcgaaaatatggagctgcgggtttttatcagacgtagcgcccgactgacgcggaaaggacgctactattccttcgctgtttgggctgatgggaagctagtagggcagataagtattggcgatattgcccggggagcttcgcactcaggaaacttgggttattgggttgccgagaaatatagcggtcggggagtgatcactaccgcggtggcgatggtgttggatttgtgtttgggtgcgcccggtctacatcgggtagaaatcaatctgcgccctgaaaataaggcttcgcgtcgggtagtagaaaagttggggttgcgtttcgagggacgcaaacgcaatttttatttcatcgccggacagtgggctgaccatttagggtatgccgcgactgcagaggagattcccgcgggtggatacctggcacaactaaagaaacgggctcgcctgaaagcgggggagtcggtagctataaccgacgaggacgagaggtagctgaagtatcctgggttttgttccgtttcttatactggggtcagttgatttacctggtgttgattatagcttgcgataatctgctctggggtggcgtagcctagggattcgtggaggcggtggttgttccaccaatacacccagttcagggttgcccgctctacctggttacacgagcgtcaggtgtgagagtagatcaactcggtcgtgtaagcccgcccgcggtttctgctagggcgttatcgtaggaatcaccaacagttccggtcgatgatttgataccggctgttgccaggcgttcactgtatttaatgcttgtgtattgtgatccgtgatcgctgtggtgtatcaaatctttaaagcttaccttggcgcattggattgcctgttctaaggcctctaagggcagcgcctcagtagttatggttgaacgggtggatcagccaatgatctttcggctaaacacatcggttacgaacgctgtgtaaataaagcccgataaggttctaacgtaggtaatatcggctacccatagctggttaggttctgtaacgctgaaattacggttgactaaatcaggacggttatcaatcattttagcgggccttgtagttaagggttttcgacccctgaccacacccttccacaccggctaggcgcattagtctggcaacctggtcacggccaacctcggagcaatctcgctaacagccctccactgcgaacacgagttatcctggctcaaacgatcacgaaccgtctgaaccgcgcgatccttaaaaccctacgaataccttctaggtatgtccccaaatcctctcaaaaacgggaaggaacaaaacccaggattcttctatatttgtcaagcggttatggaaagctcgtgttgggcattgagtgtgcgatagactcggcgagcgatatagcgtttgagacagcgtcggatttctcggtctgtttttccttcttcgcgtcttctcgccacgtattttcttgtttcctcgtcatgggtcattttcacgatggcaaccatgtgtagagcgctgttaagcttacgatctcctccgcgattgagccggtgtcgaaccgtgttgcctgacgaggccgggattggattaacgcctgcaagtgacgcgaattctgcctccgttcttattcttccgtagtgagaccaggccgcgagacatttcgccgcactcacggcgccaaatcctgtctcttgaagtaatggtgcggcttcactgatctggaccagtccagcaagatcacgctcgttggcccccagttcgcaatcgagttcaagaatctggtgagcaagtcttttcgcttcggttctagcaacccgtaactcgatatcctccccgcgcattcgccacgaggcaatctgttcgatctgagttcgtgataacgagctacgcgcatcgatacccaacgggttgccacgcacaagagcagtcagcgcgtttactttccgggtgcgttcacctgccagtagttctcgagaagcgacaaggatccggattgcttgacgaatacctttaccgaggcgaggccgacgcaacttatccaccggcaaccccagtgctgctcgcgcgatccttgcagagtccaattcatcagtcttccccacaccggcacgatgctgagaatcaacacggggcgcttcagcgaccgaaaaatcactcgccagcaccatgcctgtcagaacagcatcataagaagaagtgccttcaatcacccacaaagcttccacatgtgaacgagtgcgatgaacaacccacctcatcgcacgtttcagccttgcttccgtcgtgggaaacttctgcgatcctaaaagttcgcccgtggaagagacaagaactgaatacacgtgatggcgagcatgagtatcaacacccacaacatacgggtgaacatgagcaacaatagacatagcggtaataccttccccataagtggaaaccaacgaccgtcaggccgataccgacctaggaaggaatcacctcggaacatgtctgtaaggagtcacgaattcacacggacaatcttctgatcaagctaccgacgtgggctaggcggtatcggccgcaccatcgaatagcggacaaatcctgggaaagacaatcttgtcaaacgcttcaagagtcacaccacacgagagtaacggccaataccaatcctgccagccaatcccagaccagccaccccaagacttacatacgcttcaaacaatctatttcgcgctcaaactaaatgaggcaccacaccgccttcgcgctcaaaatatgtaaggtacgccggcctattgacgtgattatttggttttgataaactttgcccatatttaatacacaaaggtggagttctgcttctggctgactgcgaaatatcagttagaaatgattccataaggcaaactttgctagaccttgatgggtagtcgatgtcttgtttgaatggtgagcaaatacaatctgggtgttggacaagctgtattggaggacgatggtgtccaggggtgttgcattagcagagtcgtggctgcttactttgatttacgcggccagcgcctacggcaagtttctgcaaagtagccatcagcgagttggtgatgtccaggggtaccgtatattgccaataaaatggtccaagccagttgctatagctgttccagtactggaagcgattttagcgcttggcttgaatactaaacaaactaggaaaggttcagcaatagcgtcgactctactgatgctagtttttagcggtgcgatcgctagtgctgtactacgtggcttaactaatgattgcggatgtttcggtgcgcttaaagcgtcgagagtatctctgaaggtagctgtcagagacttggtcttagcagcagtatcaacgcacattgcaataaaagcagattaggggagtgaatatcatgtatataaatcgtcgtagtttcttaagacttagtgccctctccacaggaattgctgggctaggtggttttttcccggaagtcgcagtagccaaaacggctatgcgcagaaggcttggtgaagagcttccgtggtatgcggaagaacggatagaagcggtttcaatcggtgcttctgagcagggtgcaaaagtgttgatgcaggttaaaagtattagtgaaactgctagggatgagcgacactttatgctgactaccaggagcggacgtaaaattgaggccactagcatagccttgaacgatagctcattcgctttgcattattctgagattttggatggtggaaaaatagggagggttgagcagcaactttggtcttacgatagagaatctgattcgataatgcgaatcgatcttcctgttgggttgagaagtgctaaacattgtccaacaggaacctatcctaagcgagtttgtacagcagtatctcgttccaaagcattatcttgttgtgggagttgggctttaacgccacttgggtttgctggttgcgggaggacagcgaacatttggtacaatgctggctgcatagctgctttcatggcgatatgttccgcctgcctggagtatgcttgcacttcgcacacttatatctgcgtcaatccctagagatttggtcaattgagtcatggaagctgaagagcgaaattctggctacctcaaggttgataagagtgtgggcacgaaaattattgaaataagtttgctgttgttagtaaattttttaataggagtttgttttattttcgctgtcaagtttgctcttgataagggaccaatcgaaaaacctgttgatcttctaaactggattgttccgatacttttcatcgtgtctaacgggttctgggaagtttttcgttatttgcgtggagaaactaaaaagtcttagagccgctttgagtagtgaatctttcagtgaagcgtactaggttttgttccgtatgcgtctagcaggtgtcagagggaagatgaagggcaaatgcccgataactacccggaaagccggtagggaagatacccgtcctgatttggtaaagcgtgactttagagcgccagctccgaatcgtttgtgggtagcagatattacctatgttcgcacgggtaagggatttgtgtatgcagcgttcgtaactgacgtgttttcccgcaaaattgttggttgggcgctatcggattcgatgcgtacgaaatccctaccgttgcaggcactcaatcatgcggtcgtgtcagctaaggaaactgcgggtctggtacatcagtcagatcatggttcccaatacgtaagcatacgtctataaaggaacgcgcaccgatgccggggattaggccgtcaaccggaaccattggtgattcttacgataacgcgctagcagaaaacgctaacggctcgtataaaaatgagctcatccacccccgccggtggaacgacgtaatagaggtagaaatcgcgacaattcagtgggtgtcatggtggaacgaacaccgcctccaccaggtgctaggctaccgcacacccagagaaatagagaccgaatattgggatacacacaaacaccaagcaataatagaaaacaaggcaaacgcctaggaacaaaacccagggcagttcactggggacacatagccgacgaggattaacctcacctacactcctactcggatagaacatgaaaaaataactaatgccagtacagatgaattaattttgttaatctttattcatgtcatctctatatatacttggcaatggctttgacctgagccatgggttaccaaccaagtacgatcccgatttacgtcgtgtgattgagaaatacggtactaaaaatagaacagctcagttaattaagcaaatgtatttcagcaagacagactcatgtgacaacgcgaatcgcagatatctcttggacagaggtattagcgaaatactgaacacagaattacaagaagatgaaggtttatggcgtgtttttgagtcacgccttggcatcgtcagtaaagatgtattaaataagttgcaggatgcacttgaaaataatgaagattgctacaatgcgtgtgttggagattggcaaaatctggcaccaaattctgataatgaaggtgaggcatacgagtgggatactgcctatcaaaatctagaaaatacgcgggataggtacatagccgatttcaatgcacttatcgatgacataattgatatcccagaaactatcaatcaaggcattgaagaaatggtgaagctcgcgaattcattattgccaaataccaggccagaatttaactttgagcaagattcatattttttgacctttaactataccgacacgttagaaactctttacaatatttcagataatcaggtgctccatattcatgggcgccttaaccaagaaaatccaaatatagtttttggaaatatgccagacaggattactgccgttaataacattgaacctgctagagggtttcacgaaatagaagatatatacgtaataaacacaacgtgcatattgccccagaccccggaagcttggcaaaaaggcatgcaggtggatcacaatcagctttaccaagatttggtgcaagcttttaattgcaccaataaggaattaatcaaacaagttacagtggaggatctagaaacctttttatgtgaagctaagattgacaaattcattattattggacactcgctgagtgaagttgatcttaagtatttccaatggttaataggagaatttccatacgctaaatggctggtttcatatcatcgctgtagtgagcgcaaagaatttgcgcacaagctggaaagaatcggcttaactaaactccaatataaattgatttgcgtagaagaattgaaattgtgaacgggttaagcgcaatcttataaaatgacatacagtatcggccaagatatttctgcctacgcttgaccctgggaaatatttttcactttgcgaattggtgcaattttcgggttaatacccaaatgttacttagcccgaacttcttttctcatctgaaagaagaaatgttcaacaatgattcatttacttccatcagtgagctacccatagcggttaatcagtacatacattggtacaatactgagcgtatgcaagaacggctcgcggggatgaccccaaacgaataccgccagcacgcgctagccaccatgggatagaatcacactgtccaagaattggggttcagtgcattcaccatatggtattggtgagagtccaaagtgaaaggttcactaatgaacatcaataacattaacaattccggcgactggaacactttcaaccaaaatattggcggtaggaccgtagaggacatctttgataaaggcgaattagctcaagagtggtgtcacaagaaaatggtcagagacaacgctttttctgcacgaatgaaaagatcatcagtcgaggttgttgtagcggccattctgttggctatttactgtttcaccgcgagggcatctggagattttgacagtatggacgcgttccttaaattcataagagatgtactttcagggtcaatattgccacttttacgtactgttttatttgggtttggcgggttcatagcagtgttaggtggcggaggcttcttccgcagagatgccgttgagagaagaaaccatcaaggtatgatgttgattgaccagcgtgccgaagaccttggtttcaagaaaaaagactggaacattgcgaagaggcaggcaaagagtattaactagaatcttttccagataatggtaggaatgtttctcagctttactatttgtctggagattgaatcttgcatccaaattacccgctttgcacccaaaaccgcacctctccatccaaaaagacggcttgtatcaaaatgagcgtctaaacatccacgcgagaatgattattgccgcgcgtccaggctttgaccctggtattttccccgttaagaggaagacccctattgtcgggaaggctgactgtcgcccctgggatttagtacctgtgtgagtaatagtacaatatcggtactttcttattttatcaggtagttcccgacgtcggtttctatgtgaccgcgtttcaaacctttcggtattgatttgagcggaaacgccagcacgaagcaactataacgcaaccaaacccacagcagacccttagatgcctgctaaaagctagcgtgagattggttaaagaataagtccttcacgcgggtagctgcgaccgaaattaaagaaaaaatgtggctattggtgcaattgttacgaatgttgcattttgctaaaaattccataactttccctgctcaacacgcctttatggagagagattctggcagctaaatagcctatttttgatatgtggagtttataggattggccttaccaattttggtattgattctcgggggaatataccttccccttttaatcgacaccaaacggcggcaagcccattcccacggcgatgaccgtttcagcgcgaacctgcgggtgttggacacccaggcacacccagaaaaacggcagcgttacagcgtaaaccccccagtcctaggaggaactatgcagcgaccagtagcaccaactcagcgtgaccacagtgaactgatggccgcgaagattaaccgggctcagcagattgagcgtcgtgcgcaggctgcccgtcgccgcctcaccctgctaactgtgcagtttgcggtggggattgtgctagtagcggcagctgcggtgacctctttttcctggttatggtcattgattccccttgctactatgggcgctaccttgttcctgggggctcgtgccgcgcaagctggacgcgaaaacgatcagcgcgccctcgagcggattcgcgcgcttgaaacccgccccgccaagggccaccgcatgagcgagagtgaaaagaagtatgcacagctcagcgcgaaagcagaagaggacttaagctcgcaggcgaaagcggaaactaaagctgaaagcgagagcgtaaaaacctctgaacagctagaaaagaccaaaaccattactgctgatacggaagcagcggattctgaccagcaaacgagcgggagcttgggacagtctgccctaggtaaattagcggctgctgctcgccgagccgcgaacttccgggaatactttgtgcgcggtgaagccgaaatcgcagctaaagcccaggaagaaaccgccgagactacctcggaaggcgaggtagccagccagcatcaggccgaagccccaacggaaaccgcggcacctgcagtcgcggtgagtaaagaaactgacgctcccgaatcgaaggcgagcgagatggccgaggtagtggcggaaactgaaaccgaagccgccgtggaaatcacggctgataaagcagatgtagaaccggcaaagagcgatgcgaccagcgaagctgaaagtacctcggctgagcgtagctggactcccgcgcccatgccgaaaccgatttacgccctcaaaccgcggctagctcgccgggacgtagatgcctccgagctgctcgcagaacatttagcagcgcgaggtagcgcaccctatcgcccttcgcgtccgcgcccacacaccgaagaatctttgaccaccgcccagttggtggcgcaaagcaaaccggtagatttggaagctattttggacagccggcggatcgccaactaataactgggcaggtaaaagccttaacggtaatcccgcgcgccgaaaacatcggtgccaatacgcaccagggttgcgccctcgctgatggcgatttctaggtccccagacatccccatcgacaggtgggtcgcgtcctgtccgcgtcctccggccctaactgtgcgatcgcgcagctcgcgcaaaatccggaaagactcgcgaatgcgttgttcatcagggctaagggctccgatagtcataaatccgcgcagacttagctgctccatttgcaaaacttgctgagttaagtcccaggcgtcttctgggctgatcccctctttggaggcttcgcgcgaacagttcacctcaataaaacaaggcagaacacgtcccggatagttggcctccaggcgacgcactaaccgctgggcagttttcagagaatctaccgtttccaccaggtcacacaccttgagggcggcggttatcttattgccctgcagacgaccaataatatgcacttccgcatctaaatctgctgcccgcactgcctcattggtagcttgcgcctcctgaacgtggttatggcccagcactaccggcaggccacgtattttcagttcgcggccagccgcaataatctgctcactagtacgggttttcaccgccaactctaaagtaacttcgctgcgccctcgtccagcctgctcacaagccttagtaatccgctggtctactttttcaatcccagtagctatatccataactcccactctagcgggcacggcaaatctagaaagttccgcgtgcagagccctaggttagatccccataggcaaccaggtacggttgcaactccctgctctcatcagtttttgcaatatccaaggcaaatagcattcgccattcccaaaggccgctgccgtcatccacttcttgtagcagcgcccaaacctgcttgccggcaagtagctcgctatcaggatcaaggtagcgagaaagcagttcccgcgccttttcaccctcgctaatcaccgcatgactactggcgcgcgccccctgatctaaagtcaggtcatcgtagcgctcccaatagtcatccaacagagccccacgttcctcatcagaccaggcattcccctcgggatgtaaatcttgacaggcctccaggcggggcagactatcgaaagctactgcctccacgcgctgccaggcagcattacggaactggcgacgtaaagcgaaaggattagcactgggcagctgattttcgccgctcccaaaggcgggttcttcctcggcttcctccgggctgccctcacgccgtttcccactggccaatgcctcccactcatctagcagcgaggaatccacccctttaaccgtgttccccaaccaaattaatagctggtcgaagtcctcattccggcgttccggcggcacgatttgtcccagggcgcgataggcgtcggtcaggtagcggagcaccacgccttcgctgcgcgccaactcgaaccgggaaatgaattgggtaaaagtcagcgcattttctaccaggtagcgcactaccgatttgggggagggggtagaaccgtaaacccaggggttggagtgggcaaaagtcttaaacgcgcccgcaatcaattctttcaatggctgtggccaggtagtttcttcgaggatttcttgacgctggttgtactccactccttcggaacgcaacttttgatacacctggtcgcgctgggctttttgctgggcgatcagcacttggcggggatcctccaacaccgactccacaatcgaaactaaatccaaggcgtaatcggggctatcgggatccaataaatccaaagcagccagggcaaaaggcgataagggctggttaagcgcaaaatcttccggcaggtcatgggtgagcactaggcgcccgagcttccccgcctgttcagaagacaaatgccgaaccacttccgcctgtttcaaagaggaataaacctgccctaaacggcgtaaatgggggttagactcctgtggagcatcgtggttattgcgtgccagccacagtaaatgctccccggcgtcgcgctcaccggaaagcacattgagcgccaaggaatggtcgattcggaaatgggagcgcagcggctccggctgggcggcgaccaggcgttcaaaagtagaccgcccccaggaaatcttcggtttttgattgtttgtcgccggcgcgctcttgcgtttttgccccttcgccgccaacttcttggcctcgatcacctcgagcggtgcctgcacctccacaaaccccatagtgtcgaacccggcgcgcccggctctgcccgcaatctggtggaactcgcgcgccgaaagatgccgctggcggcgcccatcgaacttgactagggaagtaaataccacggtgcggataggaacatttatccccacccctaaagtgtcagttccgcaaatcactgccaaaagaccttgctgagcgagctgttccaccaacaggcggtaacggggtagcatccctgcatgatgcacccccacgcccaggcgcaaaagtcgcgacagggtttgcccgaatcccttggtgaaatggactccctttaactgggcagcaattttttcgcgtttttcgcggtccagcagattagcggaagccaagccggctgcggttttcaccgcatcattttgggcgaagtgcaccaaatatatcggccagcgccccgccttaaccaggctttctagcaagtattgggggtcgtcctcgctatattccatctctagaggcaccgggcgctccgccccgtccaccaatgccacgtcccgcccgctgcgttcctttaagtcctggaggaaaaaatcgacgtttcccaaggttgctgacattaagacgaattgcacattcggtagttccagtagcggcacctgccaggcccagccgcggtcagggtcaccgtaaaagtgaaactcatccatgatgactaatccggcatccaggtaggagccatcgcgaagcgactggttagccaaaatctctgcggtgcaacaaatgatcggcgcccccgcatttagggaaatatcgccggtaatcatccccacattccgagccccaaatagttccaccaggtcaaagaatttctctgacaccagggcttttataggggcggtgtagtaggaacgctggtcttttgccagcgctgccaagtgtcccgctaaggcgatcatggatttgcccgaaccagtaggagttgccgcaatcacgtggttgccagaaaaaatttcggtggcggcctgctcttgatggggatagagcgcccggcgggtggaagccgcccaattggtgaagccggcgaggacttctaaaggatcatttaacttccccgcgtcctctaaatcgtccaacagctgatttaggggggcactactcatgcggctattctaactagcttccgcagtatggacacgtttgcatagaaacctccttcccgactgtcctaataggggcgcccaaaatagtcttgggcggatgaaaggacagaaataacgtggatcaagccgccgaaatcgtcaagcaaatagctgatgccatcgcactctatgccgaaatttggatcctaatcggattgggaattttctacacggtgattacccggggagtgcaattccgcttcttccgccacatgtggaaagtggtttttgcttcccgccagggggcgcagggaggaatctcctccttccaggctttcaccatctccttggcggcccgggtaggggtaggcaacgtgtttggggtggcagcggcgctaatcatcggcggtccgggcgcgattttctggatgtggatagtagcgctagtggggatggctacctcttttatggaatccaccctggcgcagattttcaaagtcaggaacgcggacggtactttccgaggcggcccggcctactatatgtggctagggctgcgtaaacgttggtttggttccatctttgcgatcattgccatcattacctgcggtttcgtgatcacttccgtgcagtccaatgcgattgccggctcgattatggccactatgggcacgactgaagcccagcagggcgcccattcggcgattatcgcggtaatcctgttcgttttcgcagctccgattattttaggaggaatccgttcggtagcgcgagtaaccgaatggatggctccgattatggcggtgatttacgtgattatcgccctgattatcctggtcatgaatatcgggcagatcccggcgatcttggcgttaatcgttaaaagcgccttcactggcggggcgctgggaggcggcgtcggcggaggaatctttgctgccctcatcaacggggtacagcgcggcctgttttctaatgaggccgggcagggtactgcccccaacgccgcggctacggctacggtttcccatccggtgcgccagggtctgattcagtcgctaggggttttcgtagacaccatcatcgtttgttccgccactgccatcatcatcttgagtgctcccaagtcggtactaaccggtactgatccctcccaagcggcctctttgaccagcgtggcggtagcctcccaactggggggctggtcaacctacttaatgttgctgattatctcagtactggccttctcgtcgattatcgccgcctacgtttattccgacgtaaatatgtccttcgttaccacgaagtcttgggcatcttggctggtgcggatagtttcagtggcatcggtggtactgggagcagtggtttctctaccgctggtgtggaatgcggtcgatatcgctatggcagccatgactatcaccaacttgattgcgattaccttgctgtggaagtggggggcgggcgccttgaaagattactcggcctcacggcggcgtgataagaacgtggtaccagtatttgtggctaaggacaatccctatttacctggggaattacccaccgatgtttgggatgataccgatgatcaaaccgtttccacagccaaggcctagcctcccttgcctgccagaaaaataagtgacttagttttcaggttttcgcgtattcgatgccctaaggcaaaatagtggctatggaacaaaccccaaaaacagtccattctgatttcacgcggctagaccatttgaaagcctgggcggtacacgcttttacggcctcggcagtaatctgggcaggctgcgcggtgttggcgttgatgcgccgcgactacttgcagatgtggggctggttggcaattagtttggttgttgacggcttggacggcaccctggctcggcgttgccgggtaaaagaggtggttccctggtttgatggctccgccctcgatctaatcgttgactatttaacctggacgtttatccccgcgattttcatgtcccaaaccatagtgtttgccccgggaactcccggcaaaggaatagaccttgtggtgacggaagtgctgatggtagcggtttgtgcgtcctctatgttttgttactgcaataagaaagcaaaaagctccgataactatttcgtagggttccccgccgcctggaatatcgtaatcctatatttgtacctggtggcgcttccctggtggttcaatctggcaatagtgctgctgttcatcgtgttaacgctctccccgctcacgttctgtcaccccttccgggtggaaaaactgcgctggctcaatatcttgtcggtagttatctggctggcctgcatcatttggctcaccatctacttcccggagcgcaacccgctggtctggtgggcatggtggattagcggtatctatttcataggcaacggggtggtgcgcaccttcgtcggtccccaagccgtgcgcaagacaaagtagctaactagctgaatcgctagtgccgctaacgtggtgttaacaggaagttcactaggtaacgttcccgtaaatatttggtgccttctaccaggaaaccggaaataataaacaagattacgatcactattacataggtggggtagtctttaccggtcatcgcaaaatacacatagggagccgcgaaagtaatcgcggtggtaaaggtgcctaccatccgcacccagcgacgtttggcggtgaacatagccagcaccccccaggtataggggatggcggtagcaatatccatagtccacagcaccagcagcgaaccgtgaaactctttaaccaggcttaccggtaaaacccgcaaactggaataggtgataaccaccaaataggccagcactttcgggtcggtacaccatttcactaggcgggagcggcgggtttgggtaattccgcatgccttaagcgctcccgaaagttccgggggcatccgggtagcatcgattccctggaaagtttgtcgcacccgctgcctagtgttttcgctgaggtcttcccagcggtcaatgatcgctcccatcaggttgcgcggatctaacatccagggacgttcggggtctgtatcctgctcagaagcgggaatcgctcccactaggcgttttctatattccatgccgtcagggtagtgggcagcgtccactaaagtggagctaccgagcaggtgggcgaggcgttcggcctgcgcgccgctgcctcctcctaaccagacagagagggggcgttgcaagtcccagcgcagttcccccaagaaccgctccccgtcctcagaggctataaaatcatcgaaaccttggtttggaagggtgaaaagccaggaaacatcgcgggtactgcccctccccaattcggaaacccgatgcagaccagtgccacgacatagaactaccggatccacagaatatttagataccacggctagatcggtgagctttcgccctttattcgaggaggattcgatcgtcgccacggtctccagtctaggagaattccagattttccggtcttttcatggcgagaaagcgaaaaaatggtcatactagaactatgaaggttttagtaactatcgcctccaagcatggagccacagaagaagtcgggaaagtcatcgccgaggaactggaaaatgcgggtctggaagtagacctggaaaaaccagaagaggtctacagcctagatggatacggggcagtaatcattgggtcagctgtttatctaaccaaatggatggataatgccaccgacttctgccgccgctttgcatcggagctgcggcgcaccccgctctgggcattttctgtgggactttcgggagtgccacaagataaagtccaagatccctctagggtaggacctgtgcttttgaacattgagcccaaagaatatgtgactttccccggcaagctcgatcccacagaactgtctttgcgtgaacgcacagtagcgcgtatggggggagctgttgagggcgacttccgcgatgaccagatggttcgcgattgggcgcaaaagattatcaaagagattaaggcgtaacttttctgttaggttcccaactggtgtgcgcagacgaccagttgaccagtccctaacctggtcaaggtcatctgcgcgcatttagtagctaattgaggctttggtgacgcgctaagaatttgtagacgatcgcgtcatctactcctgggaaggctcccggtgggactgccgccaacaggtgggaatgggttttcacttccggatatgctttcccatcccattcgctggctaggcgcggatccgccaaccggcagcaccgaggatccgggcaggtagaggcaagacgattcttggtgtcgcgtccggcaaaccacttagactccgcgaagggaaccccaatcccgatggagtatttcccggtggatgtggggactatctgggcgctgcaaaagaaggttcccattggggtgtcggtatattgccgatagggtttgctcgcgtcctcctgcttaaaagcctgcatagaagcatatttacggcatataagttgcccttcgatagccccggaaacatcctcaggaaaactaatcccgtcattggcatagattttggtgagcaccccggcaggggatacccggtcaaaatgcaggcggattcccagatgccgcgttgccagattggtgaagcggtgggcagcggtttcataacgcaccccgtagcgatccaccagcgctcccacttccagttcgcgcgctttcttcgctgcctgcaacatggctactgtcggcttttccggtagcaaaatagcagccgcgaaatagttagcggcgatgcgttggcgcaaaaactctccaaaactgtggggggtatcgtgtccaagtgccactccggctattgaacgcagccccaaggagcgcacatatttttcccccggctggttggggcgtaaataaatccgccgattcttcatatcccgaatcgcgcgagcggctgccggcagatcatcgacgcggatcagggtatatcccaggtggcggactatacgttctaaatcgccaggggcgcgcggaccgttttccatatccaaggcacccagaatatccgcggccacctgctcgatctccgctagatagttatcgcgggcgcgcatttcctcccgtaacttgcgattttcagcgcgcgctttttccggggttccagcgtgaacccgtcgggaggacgccagctcgcgttgtagacccacgattactcgcaaagcgtcggtaggcaggcgggaagaagggttaagccggggcaagtccagtttttgataggaggattgtgcctggtagctggcaagttccagttccagtcgggcgcgctcgtcgggcgccttgtcttctagtaggtatgagggagtaaccgagagcgcctcggaaatcgctttcagcagggaaagccggggttcacgtttgccgttttcgatttgagagattagcgagggtgcgcgatcaaccgcttctgccagttgctttaaggtgagttgcttctgttttcgcgcgtgccgaatcctcgcccccaggatggcgctgggggagagcgccaacttttcttcatcactagccatagattcctcaaaaattcgcaaattgtgaattatttcaatagtttacagcaaattgctagacatcgagagattttattgcgcaatactctaactaaggcctccagcgaggggttggtcagaaaaggctcaagacttagaggagaacatcatgagcactgcagaagaaatccagaagcgcgcagcagcaattcagaaggaatgggacaccaatccccggtggaagggcgtagagcgtccttactccgcacagcgggtagccgaactgcaaggctccatcgttgaagaacacaccctggctaagcggggcgctgagcggctatggaagttgctgcacgaggaagactacatcaacgctttgggtgccatcaccggtaaccaggcagtgcagatggtgcgggcgggtctaaaagcgatttacctgtccggttggcaggtggccgccgatggcaacacctccgataacacttaccccgaccagtccctgtatccctatgattccgcccccaagatggtgcgccgcatcaacaatgcgttcaagcgtgccgacgaaattacctggtcggaacatcaggatgtggactttgattggttcgccccgatcgtagccgatgctgaggctggattcggcggcgccctcaacgcctacgaattaatgaagaacatgattaagtccggtgcctccggggttcactacgaagatcagttggcggcagaaaagaaatgcggtcacctgggcgggaaagttttgatccccacttcgcaggcgattcgcaacctggatgcggctcgtctggctgcggacgtgcagaacacctccactttgatcgtggcacgtactgactcgttgggcgccaacctaattacctctgatgttgacgaaattgatcgccagttcctaaccggtgagcgttctgccgagggtcactactacaccaaggctggtaaagaggtagttatcgctcgtctactcgcctttgctccccacgctgacctggtctgggtggaaaccgccactccggatcccgagttggctcgcgacgtggccgaagcggttaaggcaaagtacccggacaagatgctggcctacaactgctcgccctccttcaactggaaagctaacctggatgatgctcagattgcttccttccagaaggatttggcagctatgggttactgcttccagttcatcaccctggccggattccaccagatcaactacggtatgtttgacctggccaagggctatgcacagcacgacatgagcgccttcgtagagctgcaagaaaaagagttcgcagccgagaaagatggttacactgctcaccgtcaccagcgcgaagtgggcgccggttactttgacatggtttccaccgctattaaccccgagtcgtccactctggcgattaaaggttccaccgaagaagcccagttctaaaccaaaaggcataggaaagaatgaataaccatactgatataagggaagggaaggtcgaggttcgctacccccagcatgaagatccggggactaacctcaccgaccgtttcgatgagattttaactgatgaggctttagagttcttgcgccagttgcagctacgttttggtgctacccgcgcagaattgctaaaggcacgccatgatcggcgtcagcgcctcaccaacggctacttgccgcacttcctaaaggaaaccaaagctattcgcgaggacgattcctggaaagtagcgtcatttgctcccggcttggaagatcgccgcgtggaaatcaccggtccgactgaacggaagatgaccattaatgcccttaactgtggcgctaagtgctggttggcagacctagaggatgccaacaccccgcatttcaccaatgttattggcggccaggtgaacctctatgacgcgattcgtcgcaccatcgagtacaccaacccggccaatggcaagcactaccagttaaatgagggcgagctgcccaccattatcgtgcgtccgcgtgggtggcacctgacggaaaagcacatccggattggggggcattcctcttccggttcgctcaccgactttggtctctactttttccacaatgcgaaagagctgatcaagcggggcagcggcccctacttctacctgccgaagatggaaagccatctagaggcacggctgtgggcggacgtgtttaacttctcggaagaatacctggggattccgcacggcaccattcgggcaacctgcctgattgaaaccattatgggagtcttcgagatggaagaaatcctgtatgaactgcgggattattcttccggtttgaacgcgggtcgttgggactacattttctctgcgattaagaagttccgtgactctggccccagctgggtgttgccgaatcgttccgacatcactatgcaggttccgtttatgcacgcctacaccgagttgctggtcaagacctgtcacaagcgcggcgcccacgcgatcggaggaatgagcgcctttattccctctaaagatccggcagtgaacgccgaatcggaacgcaaggtgcgcgaggacaagacccgcgaggccgaggccggatttgacggttcttgggtggctcaccccgggatggtcagctatgtacgggaagtctttgatggataccttaaggatcgccccaaccaggtagatcgtcagcgcgacgatgtaaacgtgactgccaaggagttgctggactttgcttctactccgggcgctatcaccgaggcgggggtgcgcaccaatgtggccgtaggactgcgttacctgtactcctggttaggtggaaatggagccgcgggcatttatgggttgatggaagatgccgctaccgcggaaatctctcgttcccagatttggcagtggctacgctaccagtgcgaactagatgatggccgcaaagttacccagcagctggtagaggaactatttgccgacgaatacgacaagttcctcgcagaggtgggcgaagaaggcaaagaacgcgggcagcaatctgcacggatcttcaaagaggtctgtatgcaaggggagttccctacgttcttgacggttccggtctatgccaacgagttggaatagtctggcgccagaattcactaagcgcctgaataatcttgattgattgcttcaggagtggagccaataaataaatagtttactgaccggtgaccggcggggagattttctccccgccggtcattccacaactactgctctttcacgcgttctttggcgccgactggaaaactatctgtgtttttagcatcagagtttcgtagctacattccgattatcgcgccaagaaaagtatctctagtcacatggaagcctttcagttatgcataactattcattacttgatataaatattcactatgaaggtttcaattattggtgccagcggatttgccggaggagaaatcctgcggatagttgcggcgcaccccgcctttgaggttgaccagctatgcgcgtcctcctcagcgggtaaaaagctaggggagttccacccccaacttcctcagttagcgcagcggaaactaacagcagtagacccggcagcgctaaaagaaagcgcctcgattttcctggcgctcccgcacggacaatccggcaaaatagcggggcagctacgcgaagccggggtggaaagcctgctggtagattgcggagctgaccatcgcctcacttcccaagcagcctgggatcactactatggcggggaataccaccaggcctggacctatgggatgccggaactgcagagctttagcggcccgtctcagcgcgagcagctgaaaaaaactcagcagattgcggttcccggatgtaacgttactgctgtcaccttggcctttcagccgctggtagcagccgggttaatagatccgggcgatattgtggccaccttggcggtggggtattcgggagctggaaaatcactaaaaccgcatctcttggccacggccgccctgggaaatgcccaaccctacgcggtaggaggaacccatcggcatatccctgaaatcgcacaaaactttgcggttagcagcaaaaatgacgccgaggactttaaaatcaccctcaccccggtcttggtgccgatgtcccggggaattctggcaaccgtaaccgccagtgccaccgaaaaaacttccaccgagcagctgcacgccctctatcaggatttttaccaagaagaaaaccttatccaggtacttgaactcggctcttggccgcaaacccaaggggtgaccgggagcgcaaacgtgcaggtgcaagtggcgctggatcagcgttccggaaagattattgccctcagcgccctcgataacttggggaaaggaaccgcgcaagcggccgtgcaatcggccaacttggcgctgggactacccgaatatagcggcattaaccagattggagttgccccgtgaaaaaagatgaaagcctgcaaggcgtaaccagcgtaccggggtttaaagcctgcggaatcgcctcgggaatgcgtaaaaaccagcgcaaagacttagcgctcgtccttaataccggcgcaaatccggtggccgccggagtgtttacctctaatcgcttcgccgccgctcccgtgctttactcgcgggcaatgctcagtaaaggggcgaccgggatgcgttcggtagtgcttaactccggcagcgccaatgcttgcaccggcaaaagcgggctcaaagatgcagttaccaccgccaaggcagtcggagccgccctggcaatcgatccgcggcaagtgctagtgtgctccaccgggatgatcggggtgccgctgccgatggagaaaatgttatccgggattgaaactgcagccaccagtcttagcgaagagggcggcgcggatgcctcctgggcgattctcaccaccgataatgaaccgaaaacagttcactaccaggcagaaggctaccaaatcgccggcatggcaaaaggggcaggaatgttagcgccggccctggccactatgctttgtgtaatcaccactgacgctctcctagatgccgaaaccgcccaaaaatccctagaagttgcctgcgcgaaaacctttaaccgtctggattccgatgggtgcatgtccaccaatgacaccgtaattttgttggcctccggggaaagtgggaaggcgcctagcggatttaccgcggcactgaccgaaacctgtgcccagttggcgcggaaactcgctgatgacgcggaaggcgcacagcacactgtagagattgcggttaccgaagccgaaagcgaagccggtgcattgatcgcggcgaaaactatttcccgctcaaacctggttaaaacagctatcgccgggtgcgaccccaattggggaagaatcgtttccgaactgggaaccgtcccagaaagtgtttgcccctatgaccccgcgcaggtatcggtgctgttcaacggggtgcaggtgtgtaaggacggtgccgcttgggggaaccgggaagacgtcccctttgacagtcgagaggtgcatttagaagtgcgcctgggagctggaaatgcccaggccagcgtacttaccaacgaccttacccacgaatatattcatatcaacgcggactattcatcatgattgttaaaaacctatctgcctgggataaagccgggatactgctagaaaccttgccgtggctacgcgaatattccggctcgcggattgtcattaagtacggcggcaacgccatgatttcggaagagctcaagactgcttttgcccgggatattattttcctgcacgaatgggggattgaacccgtaattgtgcacggcggcggtccccaaatcagttctatgctagaaactctgggaatcgaaactccgtttgtttccggtttacgcgtcaccagcccggaagtaatgaaagtggtgcggatggtgctcaccgggatggtgcagcgcgaactggtttctttgcttaacgaaacttcgattgcggcgattgggatgtccggggaggacggagcgttcttaaaggctgttaaaaagagcgctagcgtagagggaaaacctgttgacctggggttagttggcgaagtgactgcagttgatcccggacctatagaagatttactgcagtccggacgcatcccggtagtgtcctcgattgcggttaatcaagatgaccccacccaggttttgaacattaacgccgatttagcggctgcggcagtcgcgggagctattggagcgaagaaacttatcgtcctcaccgacgtgaaaggactctatcgcaactggccagaccctgatacccggatttcgcagataaaagccagtgaggccgccgaaatgctgcccaccatagaagcgggaatgcgccccaaagtgcaagcctgcattcaggcctgtcagcaaggggtaccccgggcaactattattgacgggcgggtgccgcactcgatgctgctagaaatcttcaccgataccggatttggaaccatggtgaagggagataactatgaataacgccgaatggataagcacctaccaagaaaaccttctaggggttttcgggcagcctcaagcctgtttcacccatggtaaaggcactagggtttgggacgccgatggtaaagaatacctggatctgctggcagggatcgcggtaaacgctctcgggtatgcccatccagaaatagtgaagactatcggggagcaagccagccgctttacccacgtctctaactttttcactaccccgcagcaggtagaggccgcggcggcagtaaagaaaatctgcgccgccggttggtcaagtcagacgagcgaaaaaatcactgcgcaggcacgggtgctgttcgtgaattcgggcaccgaagccaatgaggccgccctaaaaatggcgctagctgcccagccgggagggcgggcgattgcactgaaaggcgcatttcacggacgcaccctggggtcgctttcactgacctataaagctccttaccgtgagccctttgctcccttcgtcggccctaccgagtttgtggaggcctcggtaacaggaatcgaggcagtagatccgaaaggaatatccgcgattttcctggaaccgctgcaaggcgaagcgggagtaatccccctagcccccgaagttttagccgccgcgcgtaagctcgccgaccaaaccggcgctttgctaatttttgacgaagtgcaaaccgggatgggtagatgcggaaaatggctcgcccaccaggggattagtcacgacggaaaagaaataatcccggacgtggtgactctggcgaaaggcctaggcgccggagtgtcggtaggggcttgtgtggcgatgaaccagcgcgccgccagcgccctaaaaccgggaagtcacggcaccactttcggggggaacccgctggtaaccgcggtagtggcgcgcagcatcaccttgatggaggaactggatttaccgactcacgccgccaaagttggggacgcctggatgcaggcgatcgcaaatgcccaaatcccggggatcaagacgacccgggggcaaggactgctacgcggcctcgtcctcgaaaaaaatgttgccccgcaactagcgaaggccctgtttaaggccgggtttattgtaaatgccccggctgccaacattattcgtttggcgccgcccctaattattgaacttgaagaagcaaaaaccctgataccggcgttaaaggaagcgctcgcgcaggtagaactagacctagaaaaaggagaataaccatgagtaaagatcgggtagtactggcatattcgggcggattggacacttcggtggccatcggctggatcggggaacaaaccggcaaagaggtgatcgcctgcgccgttgacgtagggcaaggcggggaagacctggaggtaatccgccaacgcgccctcgattgcggggcagtcgatgcctatgtggctgacgcgaaagacgaattcgccgaagaatattgcctgccagcaatcaaagctaatggtctttacatggatcaatatccgctggtatcggcgctttctcggccgctgatttgtaaacacctggtgaaagtagccaataagttcggcgccgacaccgtcgctcatggttgcaccgggaaaggcaacgaccaggtacgtttcgaggtgtcgcttaccagccaaaacccggaaattaaatgtatatcgccggtacgggatctggcgctgacccgggacgtggcgattaagtatgccgaagaacacgagctgccgatcgaaaccaccaaacataaccccttctccattgaccagaacgtgtgggggcgtgcggtagaaaccggatacctggaggatctatggaatccgcccactaaagacgtctatgtttacaccgatgaccccgcctatccgccagtgccggatcaggtagtaatcagttttaagcagggcgttccggtggcattggacggacaaaaaatgtcagttctgcagattattcaggaaatgaatcgccgggctggtgcccaggggatagggcgcctagatatggtggaagatcgcctggtagggattaagtcgcgggaaatctatgaggcgcccggcgcggttgcgctgatcattgcccaccagaatctagaaaatctgactttggagcgcgaacaaggacgcttcaaacggcaagtggaacaacgctggtcagaactggtttacgaagggcaatggtattcaccgctgaaaggctccctcgatgctttcgtagaagacagccaaaaatacgtcaccggcgatattcggatgattctgcacggcgggcgggcagtagttgatggacggcgctccgaagtcggcttgtatgacttcaacctggcgacctacgattcaggagacagctttgaccagtctctctcgcgcggattcatcggaatctatgggctatcaacccagttggcagcggcgcgggaacaaaaagaaagcaagaaataatatgagcgagcaggtatcgctatggggaggccgcttttcgggcggcccttcccaggctttagcggcactttcagtatccacccagttcgattggcgcctggcgctctatgatatagccggttcgcgcgcccatgcccgggcgctcgcgggagccggtctgctagacgcggaagaactatcacagatgctggcagtattagggcggctggaagaaaaagttaaaagcggtgcctttaccccggaccccggtgatgaggacgtgcataccgccttagagagaggactcctagaggaggccggaccgcatttaggagggaaacttcgcgctggacgcagccgcaacgaccagatcgccaccctgatccggatgtacctgcgaaaccaggcacgcgccctcgccgagcgcatcatcgaggtcgcagaagccctgctgagccaggcgaaagctgccggggatacggtcatgcccgggcgcacccatatgcagcacgcccagccggtattgcttgcccatcagctcttggctcacctgtggcccctgctgcgggagatagagcgttttcaggattgggatcggcgcgccgccgccagtccctacggatccggcgcgctcgcaggtaacaccctgggactcgatccggtgcaagtgggggaagacctgtcctttgatcgggtagtagaaaactccatagacggaaccgccacccgcgacgtggtagccgagttcgcgttcatctgtgccatgaccgggatcgatatttcctgtctagcggaagaaataattatttggaacaccaaagagttcgggtatgtcactttggacgatgcgttctccacgggatcatcgatcatgccgcaaaagaagaacccggatgtggcagaactggcgcgcggcaaagccggtcgcatgattggggatttaaccggcttgctggcagtcctaaaaggactccccttcgcctatgcgcgtgacctgcaagaagacaaagaaccggtctttgaccagatcgacactttagaggtgctgctgcctgccgtcagcgggatggtagccactatgaatatcgactacggccgcctagaagaactcgctccccaagggttttcgctggccaccgatatagccgaatggctagtggcgcgaggaatgcccttccggcaagcacatgaagtatccggagcctgcgtacgtaaatgtgaagaaaacgggatagaactggcggatttgagtgacgagcagttcgccgctatcgatccgctgctgactcccgaggtgcgggaagtgctcagccccgccggttcggtgcgggctcgcgctggacacggaggtacggcgcccgcgcaggtcgcgcggcagatcgaatccgcggagcagcagatagcgcgcatccgcaccgatttcgccggcaaacacctggaattcaaatagttccttcctcagcgttcggtctggaaaaacctatttccgcgcgtgcgggcggattttgcctgcgtacgttccacgcggaggctaggtttttcctcctgccccgggcttacgtgcagattttgcgcttgtcaggaagggcggaggatggcgaaggggtcagttacctgcagggtttgcttggtgaagcggaaacgacgcgcggggcggccacctttggtgccgggggctttacgttgaccggtgggggcgagctgcccgcggcgagttagaacccgctgcagattggtgggggagacttcatgtcccaaagcggcctggtaaagacgggttagctccgccatagtgaaatccggaggcgccaaggcgaacgcaatattggtgtaggaaagtttcgcccgcaaccggtctaccccctcggaaataatatcggcatggtcataagccattggcggcaggtcgtttaccggtacccactgggcatgaggaggaattgcggtagtcacgtcggcaggcaccagccctaaataggcggtggccacggtacgttggctggggtcacgggaaggatcggagcgagtgccgagctgttccatataggaaagtgccgcaatatccattttttcggaaagatgtcgaaaagcgctggcacctagagtttcttccggttctaaagggccagaggggagggcaggtaagccctgaaaaggtgggtgctctcggcgcgccaccagcaccattagctgcggggaatctccacgaatttgcaagactacgctcagtgcctcatgccggtagacggcagctccttcggcgtctcgcaattgggttctcacaaaatcttatggtagcttaaatttcagttttcgactattaggcgaaaactgaagaagttacctcgagaaggaaagtctccaagatgaaacaacgtataaaaggctggttatcgctatttttcattgatgcgatgaccggtatggcacacgggctgttcgcctccctgattatcggcaccatcatggtgcaagtgggtggtttcattccgggaatcatcgggcggggactggtgctgatcggctcagtggcctcggtacttaccggtgccggcatcgggatgggggtagctcatcgcctgaaggcctccacctttgtggtagttggaaccggactagctggaatgattggggcgcatgccgccaaaatcttgagcggtggaatcgtggatggtctttctatgcagctgaaaggaccgggcgagccgctgggggcgtttatcgcctccttcgtggcagttgagtttggcctgctggtttcaggtaaaactccggtagatatcctggttacacccttcgttacggttaccagcggcactatcgtaggtctagccatcgggccaggtatctcagagctaatgacagctttaggagccatcattaactggggaactgagcgccagcccttcctgatgggcattattgtgtcggtgctgatgggaatgatcttgacgcttccgatttcctcggcagccctgggaatcgtcttgggactatccggcctggcagccggggcagccactgtgggctgtagcgcccagatggtaggtttcgccgtcgcgtcctatcgagaaaataaagtttccggcctaatctcgcaggggatcggtacttccatgttgcaagtgcccaacattatgcggcatcccttaatctggattccccccactttagcttccgcgattctcggtcccatcgcgaccatggtgttcaagatggaatcgaatgcggccggctccggaatgggaacttccggcctggtgggacagataatgacctggaacgttatggggccgaccacctcctggccggcgctgctgggaatgattctgttgctgcactttatcgcccccgccgtcctctccctgctatttgccgagtttatgcggaagcagggttggattaaggccggagatatgctgctcgaaaaatagggagtattccggataggaggcaaacccccagccgtgtccgtcggtgggttagactgagccgagaagagtaacaccgtattcacctcagagggtgagcggcgggtttaacctgcaggagaaaggaatatcgtggccgatattattgatgagctggaatggcggggcttacttgcccagcacaccgatctggaaaaactacgccaggcacttgccagcgggccggtcaccttctattgcggtttcgatcccaccgcagcatcgctgcaccacggacacctggtgcagctgctgatgatgcggcatttgcaaaaggccgggcatcgtcctattgccctggtagggggcgctaccggcttaatcggggatccccggatgaccgccgagcggcagttgcagcctaaagaggtagtcgcgggctgggtggaacgcctgcgcggtcagatcagtcgcttcctcgatttcgagggcgataacccggcaatcatggttaacaatatggattggatccagaacctgggagcgattgagctcctgcgtgacctgggtaaaaacttccggatgggaaccatgctggccaaagatgcggtggcgcgacgcttaaactccgaggaaggcatttcctacactgagttcagttaccaaatcctgcaagcctacgatttcctgcagctttaccgccgttacggctgcactctggagaccggaggcaacgaccagtggggcaacctagtgggcggcatggatctcatccacaaggtagagggtaaagacgtccacgtaatgaccactcccttgatcaccaaggctgatggctccaaatttggaaaatccgagggcggggcgatttggctggatccggaaatgctttcaccctacgagttctaccagttctggctgggagccgaggatgcggacgtagttcggttcttgaaggtattcactttcctgccgcgtgaggaaatcgaggcgctggcggtagaggtagctgagcgtcctcataaacgggaagcccaaaaggcgctggccgccgaagttacccgcctggtacatgggcaggaggctcttgaccaggtgttagcagctaccgcagccctatggggtagcggggatctgcaccaggttgacggtaagactttaaagggagcgactgcgcatttgcccagcgccaaggtcgaaatcgggaaaacgaacttggtggatctgctgatagaagccggttttgaaaagggtcggggtgcggccatgcgcaccattaagaacggcggcgcctatctgaacaatcagaaagtaactgatccggatcggattattacttccgaggacgtgctgccgggttctttggtgcttttccggaagggcaagcgtaatctagctgccgctcacctgcagtaatagggcatttttggcagtgtgtgagagctcaccgcgtctgagtttgaagttttctgagcgcagtgggtaagttattacctgttgcctcggcaagggacttcggttcttggtcagtgggctagattgtttgacttagtatttaacagaaaaaactggttttatggcctgtttcacttagaaataggttgaaatcggaaaatcgaatctgttagactgagactcgcgcgtttttcgcgcagcaacccttattgatcgtttttggttggtttgtggtttggttgtttgtgttctcgatagtgtgtttttttgttttgtttgtgtgggattgaactggggtgcctggctgtttggttgggtgttttggttttttcttgtttttgtttttttgatgctgatgattttggaacgttttgtttttatgattgttggtgtttgtttttgctggattgttttctggcttgaatcatttttttggtttttgttggagagtttgatcctggctcaggatgaacgctggcggcgtgcttaacacatgcaagtcgaacgggatccaggggtgcttgcatccttggtgagagtggcgaacgggtgagtaacacgtgagtaacctgtccttttctttgggataagcattcgaaagggtgtttaataccttatgttctgtctgcctcgcatggggtgggtgggaaaggctttggctggatttgggtgggctcgcggtctatcagcttgttggtggggtgatggcttaccaaggctttgacgggtagccggcctgagagggtggtcggtcacattgggactgagatacggcccagactcctgcgggaggcagcagtgggggatattgcacaatgggcgaaagcctgatgcagcgacgccgcgtgggggatgaaggccttcgggttgtaaacttcttttgctctgaacaaggcatgcctgtggggtgtgttgagtgtaggggttgattagcgccggctaactacgtgccagcagccgcggtaatacgtagggcgcgagcgttgtccggaattattgggcgtaaagggcttgtaggtggctggttgcgtctgtcgtgaaagctcatggcttaactgtgggtttgcggtgggtacgggctggcttgagtgcagtaggggaggctggaattcctggtgtagcggtggaatgcgcagatatcaggaggaataccggtggcgaaggcgggtctctgggctgttactgacgctgaggagcgaaagcgtggggagcgaacaggattagataccctggtagtccatgctgtaaacgttgggaactgggtgtggggggcttttttgtcttctgcgtcgtagctaacgcgttaagttccccgcctggggagtacggtcgcaaggctaaaactcaaaggaattgacgggggcccgcacaagcggcggagcatgcggattaattcgatgcaacgcgaagaaccttaccaaggcttgacatgcactggaccggcccagagatgggttttcctttttggctggtgtgcaggtggtgcatggttgtcgtcagctcgtgtcgtgagatgttgggttaagtcccgcaacgagcgcaacccttgtcctatgttgccagcaagttgtgttggggactcgtgggagactgccggggttaactcggaggaaggtggggatgacgtcaaatcatcatgccccttatgtcttgggcttcacgcatgctacattggcgtctacaaagggttgcgataccgtaaggtggtgcgaatctcttaaagggcgtcttggttcggatcggggtctgcaactcggccccgtgaaggtggagtcgctagtaatcgcagatcagcaacgctgcggtgaatacgttctcgggccttgtacacaccgcccgtcacgtcacgaaagttggtaacactcgaagcttgtggcctatccgttttacggggggagcgggtgaaggtggggctagcgattgggacgaagtcgtaacaaggtagccgtaccggaaggtgcggctggatcacctcctttctagggagaaattatttatttagcgcaaataaaacgaggaaacactttcctcccttctttttggggggctatcgggtataggaacaatcaggccttaagggtttgtttgtttggctcattcacttttgaaagtttgttgcttttggggttttttgggttggttgtttgttttttggagagtggatgtgagtgtctttgtgatgcttttattgtgagaatcttgttcgttgaccacctttgggtggttggtgttttttttgtttattggtttgttttttgtttttgagcgtttggtggatgccttggcatcgtgtgccgatgaaggacgttgtggctggcgatagcctcggggagttagcgagcgagcgttgatccgggggtttccgaatggggtaacctaaccatagttgtgtgtggttggcgcgcactgaagtttttgtaggtgtgtgttggtagggtgggaagtgaaacatcttagtaccgccttttgtgagatagtccgtgtgtagtggtgagcgatagcgggtgttggctaaaccgtttgcgtgtgatactcggcaggggttgcgcaggcggtgttgtgggactgaatcgtcaagcaactgccgttgtttggaacgtttttgtgtgtgtgaggtgaataggttgggatgccttaccggagaccgtgagagtcgggtagctggttacatatgcagtgcgttgggttttgttcccgagtagcgcggggctcgtggaatctcgtgtgaatctgcccagaccattgggtaagcctggacgggcgcggtgaccgatagtggattagtaccgtgagggaatggtgaaaagtaccccgggaggggagtgaaatagttcctgaaaccaagcgtttttaagccgtcagagccgcggggccttcgggttggtgtggtggtggcgtgcctattgaagaatgagcctgcgagttatgttgcgtggcgaggttaacccgttgtggggtagtcgtagggaaaccgagtcctgggggcgttttagttgcgtggtatagacccgaagcggggtgatctacccatggccaggatgaagcggcggtagaacgtcgtggaggtccgcacccaccagggttgaaaacctgggggatgagttgtgggtaggggtgaaaggccaatcaaactccgtgatagctggttctccccgaaatatatttaggtatagcgttccattttttgcttgcgtgtggtagagctactggttggttgatgggccttgttggttactgagatctgctaaactccgaatgcgcgttaagttggtggggcagtcagacagcgggggataagcttcgttgtcgagagggaaacagccctgatcatcggttaaggtccctaagtgtgtgctaagtgggaaaggatgtgtagttgcgttgacagccaggaggttggcttagaagcagccacccttgaaagagtgcgtaatagcttactggtcgagtgattgtgcgccgataatgtagtggggcttaagcatgccaccgaaactgtgactacagcattttttgtgttgtggggtaggggagcgtcctgcattgttgtagcggcctggtgatgggtcgtgtgtggtgtgggagtgagaatgcaggcatgagtagcgagtccagcgtgagaatcgctggcgccgataaactaagggttccaggggaaggtttatccgccctgggttagtcgggtcctaaggcgaggccgtcaggcgtagtcgatggttgagcagttgatattctgctaccgggatgggaccgtttttagcgctttttcttttaagcttgacgccctatttaggtgtttggcttccttcgggttgctgagtgtctttggggttttgggtttttggtttgagtgttttagcttcgtggtgacacagtgagattgcctggcgcggtgatggtttaccgtgttcaagcctgcagcctgtcttctaggtcaaatccggaagacgtaagggtcagaggtgatggtggggcctgtttgggccgataacagggttggtctgtgctgtctagaaaagctgcgttgtgaggtgttattccgcccgtaccctaaaccgactctggtagttgggtagagaatactaaggcgagcgagtgaatcgtggttaaggaactcggcaaattgcctccgtaacttcgggagaaggaggccccaccccttgaaaccgctttgcgtggttagggggtgtggggtgcaatagcaagatggaagcgactgtttatcaaaaacataggtgcgtgcgaagccgtaaggcgaggtatacgcactgacgcctgcccggtgccggaaggttaagaggaactgttagcatttttgcgaagcggtgaatttaagccccggtaaacggcggtggtaactataaccatcctaaggtagcgaaattccttgtcgggtaagttccgacctgcacgaatggcgtaacgacttctgtgctgtcttgaccgcgaactcggcgaaattgcattacgagtaaagatgctcgttacgcgcagcaggacggaaagaccccgggacctttactatagcttggtattggtagctggttgtgtttgtgtaggataggtgggagacaaagaagcaggaacgctagtttttgtggagtcggcaagtgaaataccactctgatgttgctggttatctgaacctgggcccattatctgggttagggacagtgcctggtgggtagtttaactggggcggttgcctcctaaatggtaacggaggcgctcaaaggtttcctcatcctggttggtaatcagggtttgagtgtaagtgcacaaggaagcttgactgtgacactgacgggtggagcaggtacgaaagtaggaactagtgatccggcaatggcttatggaagcgttgtcgctcaacggataaaaggtaccccggggataacaggctgatcttgcccaagagtccatatcgacggcatggtttggcacctcgatgtcggctcgtcgcatcctggggctggagttggtcccaagggttgggctgttcgcccattaaagcggtacgcgagctgggttcagaacgtcgtgagacagttcggtcgctatccgctgcgcgcgttaagacttgagaaagtcctgtccctagtacgagaggaccgggatggacgaacctctggtgtgccagttgtaccgccaggtgcatggctggttggctatgttcggaaaggataaccgctgaaagcatctaagcgggaagcctgctttaagataaggtcttttaggttcccagtagactactgggttgataggccagaagtgtacacgttgtaaaacgcaaagctgactggtactaaagaaccattaaaaaacaaacacaaaaaacacgctagtgttcaagcatccacacaaaaatgtcgtcacgaagacgctcacacccactctccgaaacccccctatacaagacaggggacacacccaaacaaaaatggtgaacagccctaacaaggtaacaccagaaaaacaaaccgggtgtggaatatatagtcttgtggtggtcatagcgcctaggacacgcccagtcccatcccgaacctggaagctaagctaggcaacgctgatggtactacgccccaacgagcgcgggagagtaagacaccaccacaaccacattacaaggaggccaaaccccaaacggggcttggcctcctaacttttaaaagacaggctacaaaaactaataacagtttttataccctgccttgctatatacagacggcaggataggacaaccaagatagtttcccctaaccagccttgctttatacaggcagctgaaaatgatcaccaccaccgctttttgctccgggttttaaaaaaatatgtaaaaccttcaggcaagagcttaaaagcaaaggatcctagattaattcgtaacgaacatagtgattggtcaagcccgggggtacttgatcgatctgggtaataaccgtatctttaaagcaagcctaagtgtgaggcaatgcacatgacggaaaaatctgtgtattttcgctgaaaaagcgtaattcaggtacttatcttaattatttcccaatttttaactcttaacgtaggtcatatttttattgcatactaccagtgaggaagaagcgttccccttctcttgagtgtgcatttctattctcgggtggtaggtgcgtgactttcggctatttaggttattggagtaggtacgcaaatgcttttcaagtgtcgtcgtgaggaatcatctgcggagcagatcaacgacggctttttcgcggttgatgagggatctacccttgcgaaaaagaacttaaggacgcggatatcttttcgacgctcctttcgtcctttcaaaaccgcaaaaacttgggtacgtctactgggggcatttgttgcttacaccctgattgctggggcattagtagtcggcgtgcaaactgagggcgggcagctatctaaggcgggggctgccccatatttaggctcaacggatccggtaagtggggaaagtcagctcgacctaagcaagccctatcaatcgattgtgggtgcaacgaatccgccaaaagtattgacatttaccccggggcctcccgatccctcggtgatgggaaaaccgcccaaagtattgcccggaacccaaaagaaaatcgggggcaacgtcttgtatcaacggtggggtagttccgaagttggcaggatcgattggctgttaaatgatgccgggactgcctatgcgggatatgaaaaacctaccgccatgccgatggtgggggtgcgggtctatgcccgttacatgaaaacctgtggtccacttaaagggtacgtttccaacacttacactgccgtcaccgattatcgcggtcactatgagattcagatgggcgatgagattacccctggcggtttagtaacattcgatgccgatcccaccgtttcagcggggtgcgaacgctggaaagtctgggccacgaacccagacccggacacctacagcacgctatacactcccggtttcggaaactatttcccctctaacgtcggtggcaatgttaatgatacgacttgggcaaccaacgatgttgccgcggaccacctgtacaacaccaagattgcctatggggatcgcatcaagaatcaggctatgcatattaccgatatccatgggaatatcgttgataccacctatgaggaaaaccagaaatacgatgacaaacagggcggatatgttaactcgcgcgtggggtggaacctaaataagtccaaaggatcggcaacctgggggccaataactgcgctaggagatcccggtgacataggggcaaaagggactaaggtgtacgcctcctacctgtctgactatgccgtggatcagatttataacgggagtgccgcgcgggacattggctggaacgcgaagattcggcaggatagcgcgggatggaataacgcgtgggaagccaaactacaaaactggattaagaagaaaatagcgaaagagacccagacctacttagcacaagtagatcaaggtaaggatgttgcggcgtgccaggcataccggcaccaagatgaaaccagtattgatgcggaaacctgtaaaaatcgggcatttatagccgcacaaaagaagtggattgccgagaccgtttccgcctataccaaacctgccgaaaacggtcctcccccgaatgcaacagattctggaacccccggaacctgggctaggttacagtttgcgggcacctatggcaacacctgggatgcttgtggattggctgcggaagtacagttttcctgtaaaaaagaaaacgggcagtataagtattggcgtcgggtcgccggcagcagagaaggggatccgattggtatctggccgcaatctaatgtagtggcggcatcaaaacacgttaatggtgactggttgtttgtttccaccgagacgatgccgggagtttcggcggcttcaccattccacgctaactggtacggggcgatagatcccctgtcacgtcccattaaaatacctgttccctaccaaaatggaggtggcgacagtacaactaatggtgctggctgggtcggaatcgattgggatcgcgaaggtgacagcaccaagcgggtagacttcgcgctcttcccggcggagctctactttgatgttaccccctgggacgacaatgagcacctggcggtagctactgacaccgcgcatacccgggcctcgggggtacccagcgtcggattccaggaaggtactttccaaatcgagtggtatgacgagcagggaaacaatgtgaagaattgtaaaggcttgcgccccttagctaatggaacgctgccttcctgtgatctggacgtgcccaaggatctcgcgcaaccaaccaggtactatgcgcatctatatacggttaacgctctgggagcaaagagtaacgacccaatcgggtctgactcttttaccgctgtgccagtatatatgccgcggatgaccttgcatgatgtctatcccagtgcccctcaggatgatattgcaaaaaattacccgtctggacaatatccagacggcaaaaccaaggtaagtatctatcccaagaagatggggccggcaggatgcgcgaatgtagctacccaactttatgacctcaaccgcaccggtaccctaccgaagggattaaaggtggacaagtgtggggtaatttctggagcaccagaagagacgggtattttcaggcaagagatttccgcggtacgaaaagttacccaaggtcgcacgacttacgacataccgatgaaatacttcctggatatcacggttacagattcctccttgccagttattaaaaccgagaaaggtaccgaataccacgcgcaagttggaaaagcctttaccgttgattttgccaatgtgaaaggcaaggcgctaccccacgggtttgctggggcaatgcacgcgagcgatccaaatgcagaaccagcacagaaatggcggctcaaagggattaagtccatagaacttagcccggaactaacccaagcgggtttgacggtaacgggcagcaagatcacgggcgttcccacccaggtagtcgaggctcatcaaaaggcaccacaggcgaacgatgaccccgcaactgtggatatcaacgaaactaaaggccccaatgtttgggttacctatgagctggagcgggacggcgcccctctatataaaactgattgcaaaaccgatgaatccggggttcaaaaatgtatgaatgtgccccaaactgatgcgcagggcaatcagctttacgggaaagagacggtgcagtggactgatgcgattccgttggctatcgccaaggttagctacgtgtcagccatcgtggaagggaaaaaagaactacgtgaggggagtaaaactggtaagctgctcagtccgaaagctttggaccagcaagatattcccttccgtttccagctgaaacaggataccaccagcgcgggatgcgctggtggtggggacggattcgatcccgaaaactactttaatctgaccccgggagcagatactccctatacgaaggtaaccgatcctactttggcggcggcaactggcatctggataaagactctcacctacggggatcagacagataatatcggagagtttgagttcccgaagatgcagttctcgaaagcgggaacctactgtttcaccctgagtgagcttgccagcaataagggtttcgtcagtgatgacactttggctcggcaagtgaaagttacggttaccgaggatgcaaacgggctggttaccggaaatccgacggtgacgatcacgaaggcgtcctcgccgggtgcagggggcggaaccgagcccggagatactttcgtaaatgtctggaatggagtgcccgtacctagccttccgctatccgggggactgggggcgtttatcttttggctgctgggggcattaagctgcgtggtcgggttagtagcagctagtaggaacttcaatatgcaccctgaggtagtccgcggagcagattcagctgacgcgcggccagttaagaggaatggggtggtgcggtcataaaaatagtgtgccgtttcccagcccttaccggccgcattaccggctggaatagaaggagctagtcggtatgacggctgcgggaaggcaaataagaagaatcaaagtttatttttagatctaataaaaaactaaaggaatgaaccatgaaactaaagaaactgattgcggtttcggcggctgctgccgttagcgtgctaggtttggcggttgcgccagccttcgccgctgagccagcaccgggagatatccctgccgggaaaaccggaaccttaactgtacataagtacgcaaaccccggtattgccgatggcgcgaaagcggacgggacagagaccagtaagtttgaaagcgcaacccctattaaaggcgttaagtttaaggtcactaaactgaagatggatctgaccacggtggcggggtggcaggctctgcctaccagtgctgacacggttaccgatgcgcaaaaagataccttcactgccgagatgacaacgggagatgacggctctgccaagtttgaaaacctagcagtgggtgcatatctggtagaggaaaccgatatttccggtgcggcacctaaggtaaaagacgatggtaaagcggcatcgtttattgttactgtgccttataacaacaaggatgccgggtggctctacgatgtgcacgtctacccgaagaatgatattgagagcggtaccgccagcaagaccattaaagaggtgcccggtgccacctatatgaagggcgatgtcatcccctggagttttgaactaccggttaaccccttggcagcgggtaaaaccagaaccgcctttggcgcctgggatgcgattgcaaactatctaacgttcaaggatgttacgggagctaagtttatttctgcggcgggcgtagaacaagatatctcggtgtcctgtgacgcaactaccgacacctgggcagcggctggttatggtcataagctctataagtgtctggtggctgcaaccgatctccccaagctgaaagctggcgggaaagtagtgttcaccgttaacaccaccttgggagatattcccgcagataagagtgcggttgaacaggcatttacgcctatcgattctaccgaaccggggggcaccgtgccccctccgggccccggtgataacccgattagcccgcaaaaaaccccgtatgtaggcgacttggagttcagcaaagttgatgccaagactgctaacctcgccttggggggagccaagttcgaattgcataagctgggtggggacggtacctgtgcaacacctggcgacaagctcactggagccgaggcaacttcggaaaagagcaccggtaaagtggtatttaacaatgtattcgtcaagctggacactcccggccaagatgccactgcgcaaaaagggatgaaagcggattactgcctggtggaaaccgaggctccggcggggtatgtaaaggctaatgctacgaaagtgactatcactgccggtactaccgccacagctggcggattggcaaataaagtctttaccaacaccaaagataattccataatcccgagcctgcccttaaccggtgcagccggacgagtattgctgggtctgctcggcgcagcggtaatcgctctcgggattggatttgggattcgcagcgcccgtaaacaatagggccatcgcgattgtttattcactgcgaataactcaataggtgtttaaccaagtaggcagcgcgaacatggcgggaaagccgcgatgttcgcgctgctttttgggtgtcacctgtctgggaacttctagtttttccggatattgttcccggaggtgaaatcaccattcctgctctggttgtcaaccggtgctccctcgatataagaaattatgaaaaaacaactcgttaatgcaatcttcgtttcgctaatggttttcacgggcgtgatgactctgctgtacccgtcaatcgctagttggcggatgcagctggcgcaaaaccaggttatagcgcaaagctacagcaagatacccgaggctaatccgaaaaaagaggaacagttgaaggcggcgcggcgttacaatcaggcactggcggcgggggcattggtaaaagcccacgaacgtaaagcgctgggcactggttatatgcgggctgcaagtgaggaaatctgggactatcaagatcttttgcggatgagcccggacgggatgatgggcaggataaaagtcaagagcgccgatattgacctgccgatctatcacacttcctctgacgaagtgctgcttaaaggggcgggacacctgcagggaacctcgttgccggtgggaggtaaaggaacccgcgcagttatcactgcgcaccggggtctagcatcagcgaaaatgtttactgacttggatcaggtgaaaaagggcgatgacgtggtcttggagatattcggtgacgtatatgcttaccgagtctttgaaacccgagttatcgatccgggagacacccaggccattaaggctgatccgaaccgggatttgctgaccctgattacctgtactccgctgggaatcaatactcaacgcattatcgttaccggggagaggatctatcccacccccaaaaattatgcagatcaggctggggggccttcggagttgccgcgttttccatggtggagtctggtgattgccgggactctattattgattgccatctggatgtggtggaacgtgcgggtctataaacgcaagaaggctgtaatcgcccagaatccagacccggaggaaaagaaagcacctgtcaaaccaaggcgcaaggctagaggaagacacaagaagccctgattagcatgaggaaacagctagtagagcacgctcttaggctgccgctgcgcgttaaagacaccggttaacaggtttagatgttactaggcgcgaaagatagaatgactggcatgcgtatcgggatagttacagattgctaccccccacatatgggcggaatcgaaacccaaacctataacttggcgcaacgtctaaaggccgcggggcattctccagaagttataaccgctacccgcgatggatctttcgtggggcgacggattgaagatcagatcccggtacatcgcttaggaatgcccacaatcgggtttacccccatgaacccgtttgcagctccgctattccgggctatttttccccgctttgatttgcttcacgtacacgtgggggtactatccccctttgcccacctggcactgcaggtggcagcgcaagggaacattcctactttggctactttccactgtgagctttctacctgggcgccgattatgcgtgccagcggattttttgatcgctgggcagaggcgggagttttattttccggggtatcctccctaatgaactcgcaaatcaaccaggtgctacaacctcgaaatcgccggaactggccaataatccccaatggagtcgatactaacttttgggcgcctaacgagtccgctgcgcaaatagatggcaaagctccacaggaaaaaaacagcggaggcatgcccgcggaaagttcaaatcttggcggggctagtagctttgaagccgtgagcgctattcgtctgatgccccggaaacgacccttagccctgatcaagttcaccgaaaccataaatgatctgttgggtgagcgtggcaacttttccctgaaagtttttggcgagggcgcattgcgacctctgctgcgccgccaacctgcagtcaccgctggacaagtcagtttacccgggcgcgaagacgctgcaggtcttttaaagacctaccgacaggcggacttgtttattaccctgtgcttgcacgaaagtttcggaatcgcggccgcagaagcacgcgccagcggattaccggtaatcgtgcgctctcaaagcccaatcactgattttattaacgatggtatgaccggcattaccgctggtagcgatcaggaattggcggagaaaactgccgccgccctcctggatggaagcattaggaaaatgcaaaaaaactgtcagcagcagccctgcccagtttcctgggagcgttgcttagcggccacttttgccgcctatcgggaaacccaaagccgttcggcgcgctgaaactatttaccttccgcttgcttgcgctttgcggcgataatcccttccgcacgccgcataaaatccgagagcctagtggcggcagccaccaccgcggggccatgaaccctgcccggttggcgccccatacgatcgatggggccggaaacactaagagctgcgaccaccttgccagaagctaagcgtaccggagcggaaaccgaggctaacccgggttcgcgttcaccgatggattgggcccaaccccggcggcggactaccgaaagctgggtggcggtaaaagaagccccctgtaagccgcggtgcaggcggtcaggttcctcccaggccagtaaaatctgagccgcagaaccggctttcatggacagtgccgagccggtaggcgtggagtcgcgtagccccaaaggggactcgcaactggcaaccacgattcgctgatctccctggcggcgatacatttgagtagattcttgggtgtgttcgcaaagcgctttgagaatcgggcgtgcggaagcaagcagacgatcttcaccagcagctgaagccagttccccgattcgcggaccgagaataaaacgcccattaacatcgcgcgccacaaaacggtgatactccaaagcaaccgccaggcgatgggcagtaggacgtgccagaccggtactggtgactagctgagccagagtacccggccccgcctctagcgcacttaggacgagtgcggccttgtcgagaaccccgaccccgcttccttcagtttgattgtccatgttctgatactgccatcttaaagcgtggaattccaactacactttccgaagatacagcaaatcaggggcgtaaaacctaggaggtgcgcatggctaagaccttggcagaaaaagtttgggctgctcacgtggttaaacatggcgaaaacggagcgcctgacctgctatatatcgacctacatttatgccatgaagtaactagcccccaggccttcgcgggcttgcggatggcgggacgaaaagtacgccggccggacctgactattgccaccgaggatcacaacacccccacggtggatatcgatttgccgataaaagaccagacttccgccacccagattcataccttgcgggaaaatgctaaagagtttggaatccgcctgcactctctgggggatgctgatcaagggatcgtgcacgtggtgggtccgcaactaggactgacccaaccggggatgacgatcgtgtgcggcgactcccacacctctactcacggagccttcggagccttagcttttgggattggtacctctcaggtagagcaagtattggccacccagacactgccgctaaaaccttttaaaactatggcggttaatatccccgggaagctccgcccgggagtgtttgccaaagatattatattggcgattatcgccaagattggcaccggcggtggacagggatacgtgattgaataccgcggggaagctatcgaaaacctctcgatggaaggccggatgaccgtgtgcaatatgtcgattgaggcgggcgcgcgggcaggtatgattgcccccgaccaaaccacttttgactatattaaaggacgcccgcacgcttccgaaggcgagcagtgggaaaaagccgtgcgctactggcagagcctgcgaagtgacccggacgccgagtttgaccgggaagtcacgatccccgctgaaagcatcgaaccctttgtcacctggggaactaatccggggcaaggggtggcgctgagcggaaaagtgcccgaccccgagcagatgcgcaccgatagcgagcgagattccgcccggcgagccctcgaatatatggggttaaccccgggtaccccgatgcgtgacattcaagtggatacagtgttcatcggctcttgcaccaacgggcgaatcgaagatttacgcaccgtagcccaggtttggcaggggcgtaaaaaatctgaggacgttcgggtattggtagttcccggttcggcgcgggtgcgtctgcaggccgcggccgaggggctggataaaatcttcaccagcttcggggccgagtggcgcaacgccggatgctcaatgtgtctgggaatgaatcccgacaaactgggggagaaggagcgctccgcctccacctcgaaccgtaactttgaggggcggcaaggaaagaattcgcgtacgcacctggtgtcgccggcgattgccgctgccaccgcagttaccggacatctagctagtccgcaggagttaccgacagtatctaccaggaaagaggtataagcgatgaaaaagtttatttcccataccggtattggggtgccgctgcggcgctcgaatgtagatactgaccagattattccggcggtctatctaaaacgggtgaccaaaaccggcttcgaggacggactgtttgctgcctggcggcaagataaagactttgtactaaatctcgctccctttagaaacggatcgattctggtggcgggccctgattttggtactggatccagtcgcgaacacgcagtttgggcattgcgtgactacggattccgagtagtgttggctcccaagtttgccgatattttccgcggtaattgcgaaaaggacgggatggtagcggcagttattagtccggaggattgccaggccctatggaaaatgttagaggcggagccgggcaaagaaatcacagttgacttagaaaaacgactggttacttgcggttcttttagctgcagtttccaaattgacgactacactcgctggcggctgttggaagggctagacgatatcgaccttactttgcgtgatgaggaggcgattagcgcctatgaggaagcaaggccggatttcatgccgcgtaccctgcccgctaagcatctgcccccagctgaggtagtttctgcccgggaagttaccctcgggattcctgaggtcaagcgctcttaatctcgtagcgtaaaacctgcttttgtccaggtggctttccccaaggtttatctttgctcttagcctagttttcttgaaaacacccttgttaatagggtattttctcccagttgtctacttgaagtcgcgcaggcaggtagactgggaacactgggaaaagcggaaagggaagtaacacgtggaaccggttctagaagtgcaaggcggacatccgctgacaggtcgtattaaggtgcggggggcaaagaattttgtacctaaagcgatggtagcggcgctgttagggaaaactccttccgtcttgaaaaatgtgccacttattcgtgacgtagatattgtctgcggtttgctggaactgcacggagtgaaaaccgactacgattccgctagtggacaattgtttattgacccctctaatatcgaggctgcccaggtggccagtatcgataccctggcaggttcttcgcgaatcccgatcctattctgtgggccactcctacaccgcctcggggaagcgatcatacctgacctgggtgggtgcgtaatcgggactcgtcctattgatttccacctgtcgattctgcgttcttttggggcgcaggtagacaagatgcgttccggcattcatatcgccgctccagaaggtttgcggggagcagtcatcgaactgccctacccttcagtaggcgcaactgaacagaccctgctggcgggggtacaagccgaggggattacggagctgcgtggtgccgccattgaaccggaaatcatggatttgatcaatgtgctgcaaaagatgggcgccatcatcagcgtagatactgatcgcactatccagattgaaggggtcgaaaacctggaaggtttcactcacaccgccctctccgatcgcatcgaggccgcctcctgggggtcagccgccctcgccacccacggagatatttttgtggagggcgcctcccagccggaaatgattaccttccttaatgtgttccgcaaggtggggggcgcattctcggtggaacgagacgggattcgtttctatcatccaggcggggaactaaaaccgattgtgctagaaaccaatgtgcatcccggatttatgactgactggcagcaacccttggtggtggcgctcacccaggctcacggactgtcaatcgtgcatgaaaccgtctatgagcagcgttttggattcaccaccgccctcaataagatgggggcgcaaattcaactgtatcgggaatgtctaaccggattggcctgcagattcgggcaaagaaactattatcattcggcggcgatttccgggccgaccccgctgcacggagccgatattaccatccccgacctgcggggagggttctcccatttaattgcggcgctggccgccgaagggaaatctacagtccgcggaatcgatatgattagccgcgggtacgagcatttccttactaaactgggaacattaggtgcgcaagtcaagctggaaaaataaggggtaagcatggccggtaaattttctcgcttctataagttttgtgtacgcgtagcgcgtatacctgtaggggcggtcacccgccggcattgggaagggcaagaaaacctgcctaaagagggcgggtttgtggctgttgttaaccacatttccgagttcgattccatgaccatgatgcactttatgaccagtgcgggatatccggtgcgagttctttgtaaagaggaacttttcaaggttccggtgttgggttcgattttgcgtgcttgcgggcaaattccggtttatcgggaatccacccactcccgggacgcgctttctgccgcgattaaggggctgcaagcaggcgaatgtatcacggtttacggggaaggcaccttgactcgagatcccgatttttggccgatgcggatgaaaaccggggcggtgcggatggcgctgcgtgcgcgagtgccgctggttccggtggtgcagtggggggcgcaggatgtgctggatcgttacgctcgccgtccagacttgaagggtaaaaaggatgtgtgggtacatgctctgcccgccgtagacctatctgacctgtatgatcgggctgatgatcctgaagcttggtatcaggctaccgaaagaatagaagcggcgatttgccgcggcctggaacagattcgaggaataaaaatgccgcaccgtcctctagatcgtaaatctgcccggatgccctcaaagaaacaattaggggtagctgcgaaggcatggcgagcagatcaccccgaaaagccggtaactgcgcgggaactaggagagctcggcccttatcttaaaggcggttctaccagcactaaccctgagtctcaacaggaggggtagttcgttatgtccgcctcctccgttcgcaaagtcgctgtgctcggcgccggagcttggggaaccgtatttgcgcaaatacttgcggatgctggcaatgaggtacggatctgggcgcggcgagcagaacttgccgaacaaatcaacgcgggcgaaaatccgcggtacgtgccgggaataaaactgcatggactcagtgccgctagtgacctggaatgggtttgccaaggtgtcgggatggtagtggtgtcgattccttcaaatggggtgcgcgccctcatggagcaagtccgtgactttcttcccctaaatgccaccgtgatttcgctggtaaaagggttagaagcaggaaccttgcaagtaatgacggaagttatctccgaggccggacggatacacccttcccggatagtggcggtgtcggggccgaacctttctggcgagattgcccgacacgaacccaccggagccgccgttgccggggaagactcttggcgcgcaggcttggtggcttcgcgcattcacacccattatttccgtccctatgtggcagaagatgtagtgggggtagaaatcggcggggtagtcaagaacattgtcgctatggcggttggcgccgctgaaggtctgggactgggagtcaactcccgttctttcctgattactcgcgggctggccgaaatggtgcgtctcggggtagcgatgggcgcaaagtcagataccttcctgggactagcgggactgggcgacctggtagcaacctgctcttcctcatcctcccgcaattttgctttcggttatcgactagggcaggggatggatatttcccaggcgctggaggcttcggcgggcacggtcgagggggcacgctcgtgtccggtagtgcgcgaattggcgcataagaagggagtttcaatgccgattaactccgccgcctatcgggtgattagtggtaaacagactttagaagaagcgttagtatctttgagtactgggccgcgggtaactgatggacccagcgcgcgaatggtatagagaggacaggccatgacgccaagcgataaaagtaaacctcgggtattagtgctgttcgggggagaatccggggagcatgggatttcttgtgcgaccgcggccggggttgtcgaggcgatcgaccatgaccgtttcgaggtagttaccgtagggattaccccgcagggacagtgggtaccggtagattttagttccgaccagttccaaatatccgaggagggagtggctcaggttcctgccgcaaaccggcagcttttcttgtcccctggagacggtcatgtggtgagcttgcccacccagctgggaccagaattttcccttgctgatttgggcagttttgatgtggtgtttcccttgctgcacgggcctttcggtgaagatggaactgtgcagggactgctagaaatgatgcacttgccctatgtgggttgcggggtattagcttcggcggctgcgatggataaacccaccactaagatacttttacatgaggctaatctgccggccggaagatgggaaactgtgaccgcgagtcagtggagccatgaccgttccggggtgctggagcggttggcacacctgggactgccggtctttgtaaaacccgcgcgcgccggctcctctttagggattactaaagtgagcaacgcagacgctatggaagcagcagttatcaaggcacaagcggtggatccccgggtgattgtggaacaggagctaaccggttttgaggtggaatgcgcggtgttgcagggagctgacgggcgtcctcgtaccactgagccggggaaaatcgctatgcgcgatgacgtggtattttatgactacaaaaccaagtatttcggggaagacagcgtcagtttagaaatcccggcgaagatacccgagcatttggctacccaggtgcgcgagattgccgccaaggcgttcgaggcgctggggtgtgaagggttagcgcgggtagacttttttgtcgatcccgagaaggattcggtggtaattaacgaggtgaacaccatgcccgggtttaccccgttttctatgtaccccaaattatgggaacatatgggtattgggtattcccagcttatggaggaattgatttctttagcgctggcgcgtccggtggggttgagataacaaacatcggaaaaatggagttcatttcctgagctaacgaagaactaaacaattagggttggagatatggcgaagaaacgcgtgaccttggtaacttgtgcacagtatccgaatttatctgaggacgaggcgggactggttgatgaattaaactctcgcggagtcgatgcccggattgcgatttggaatgatcccgaggtggattgggaagaagcaggggtatgcgtaatccgttcggtgcgcgactatgccgctcaccaggaggagttcgtgcagtgggcacatcaggttccccgcttgttaaacccggcagatgttgtcaaatgggcaacagacaaacactacctgctgcagctggaggagcggggagttccggtgattcctactacctggctacagccggaacaaaagcttaataaacaccaggtacatacccgttttcccgcttccggtgagttcgtagttaaaccggcggtttcttccggggggcgcgaaatgggacgttacgacgccaataatgggacggcccggacggcggccatcactcacgcctacagcctgttacaagagggacgttcggtgatggttcagcgttacctctcgcaggtagatgaacacggcgaatactccctggtctatatgaatggagtgttgtcgcactcggtagaaaaagccgctatgctcactaacccgaataccaccgaagtgcaggccgacgaggaagtcaccggaaaccggcaacccaaaccggaagaatggatgttcggggaaaaggtacgttccgcaatccactcgatgattaaagaccgcttgggacacgatcagcacctgctgttcttgcggatagatatcgttcccgatggcaaaggttcttactacctgatggaagtttccccggtagacggttcgctatatctacgtacgcgcgaggacgggattgctacttttgccgacgcgatttgtaaccgggtcttttggtaagaacagtatttgacctgcgctaagggcaggtgtgagcggatacataggctagcttagcgacaataattttatctggagcctttggttagataaagtgggtattcgttgctatgcgataaatggtggctgtagttcagttggtagaacgcctggttgtggtccaggaggtcgcgggttcgagccccgtcagccaccccatacggcagctgtgttgcagtttgccgcagaggcggttcaaatgattccttgggcttgcggtggcagataacacactgtctggacagggattttgtttgataaacgccgctggtatcgactagcctagttagtcggtgccggttgtttggaagaccggctgggttcggttttccggacaaaagaaaatgtacgtgactaaggaaatgagcagcaaagtggtctacgcgatcgtcaaggcgggcggacgtcaagaaaaggtctccgtcggggatgtagtcgtcgtcgacaagctggcagcagaggttggcgatactgtcgatttcaagccagtgatggtagttgacggtgacaaggtcacctccgacgccgctgatctagagaaaatcaaggtaacggcagaggtcttagaacagaccaaaggaccgaagattcggattcagaagttcaagaataagaccggttatactcgccgcatgggccaccgcgcaaagctgacccaggtaaagatcaccgagatcgcctaacctcaggcaagaaaggaaaagaaaatggcacataagaaagggctgggttcctcttctaacggccgtgactctaacccgcagtacctggggatcaagcgttacggtggggaaaacgtcaacgccggagaaatcctggttcgtcaacggggcagcaaataccacccgggaatgaacgtagggaagggtaaggatgacaccctctttgctctggccgccggatcggtagagttcggtcgccggcgtggccgtaaagtcgtaaacgtggtttcggcttaacgcaaagctaatagcttagaggtagcggggtcgcctagcgaccccgctacacttatatagcaacaggtgtgtggttagtaatggcttttcagccagggcgctaaggagtaatcatggccagttttgtagatcgagtaaaaatcgatgttaccgccgggaatggtggtaatggctgcgtcagcatccggcgcgagaaatataaaccgctgggtggtcccgatgggggagatgggggacgtggcggcagcgttttcttagaggttgatccccagtcacataccctgctcgactaccaccatttgccgcatcgtaaagccactaacggcactcccggaatgggggacaatcgcgagggcgcgaatggcgaagatctggtgttgccggttcctcccggcaccgtggttaaagccgaagatggcgaaatcctggctgacctgcaaggagcgggttctcgcctggaagttgcacgcggaggtgctggcgggaaaggcaatgcggcactggctactcgcaaacgtaaagcccctggatttgctcttttgggtgaggagggtgaatcttgcgtcctcatcttggaactaaaatcaatggccgatgtgggactggtggggttcccctcctccggaaagtcttctctgataggagcgatttccgaggctaaaccgaagattgcggattacccgttcacaaccttggttccgaatctgggagtggtcaaggctggggaggaacgttttacggtggcggatgttccgggtctgattcctggtgcctctcaaggtaaagggttgggtctggatttcctgcgccatattgaacgttgcgcggtgattgcgcacgtggtggactgcgccaatatggaagctgaccgtaatccggtcgacgatatcaaggctctggaagcggagctggcagcctatgaaagtgacctggacgaagtttctggttatattcctttagctgatcgacctcgggtgatcatcctcaataagatggatattcccgacgccctagagatggcaaaattgcaggcaaaacagcttgcggagttcgggtggccgatgtatgcggtttctgcggtcagtggccgtggtttggaggccttggtattcgccctggcagaaatggttatggaactgcgccagcgagagccagaaactgaagcccaacccttgcaggtactgcgaccccgtgccgtgggggaagccgggtttacggtcacaccccaaaaaactgggcagggactggtatatcaagtgcagggagaaaaaccggaacgctgggttaaacagactgattttgccaatgatgaggcaatcggatttctcgcggaccggctttacactttgggagtagaaaccgaattaattaaagtcggtgctaccagtggagatactgtggtgattggtccaatggagggcggagttatctttgacttcgagcctttccagtcggctggtgccgaactattgggggcacgggggcaagatctacgtcttgaggaatcgacccggcgcactaaccaggaacggcgcgaacaataccaccagatgatggacgggaaagaggaagcccgccagaatctgcgggaggaagcggaggccgggctatggacggatccttccgcagactaagggatatcttccccaagacagctgttttgcagacaaaatatttacttaagtcaagaagcgcgataaagcatattagcactggctcacttttgctaggattggaataaccggccaagcagacaagctggcaagaaggggaactcaatgacggtaggcgtcggcgtcgacggtagacgcattggagtaatgggtggaacctttgaccctattcataatggtcacttggtggctgcttccgaggtgcagcatcgctacggcctggatgaagtaattttcgtgcctactgccactcagcctttcaagagggggcggcgggtaactatcccggagcatcgctatttaatgacttccattgccaccgcttctaatccgcgttttacagtgtcacgggtggatattgaacgcggggaaactacttacacggtggataccctgcgtgatttgaaacgtgaaaggccgggctgtcatctattttttattactggcgccgatgctttgcggcaaatcatggattggaaaaatgctgaggagctatttcaattggcgcgatttgtgggggtaactcgccctggtcaccgctggggcgatactgatcagttacctgccgaacgggtgtcactgttggaggtgcccgcgatggcgatttcctctaccgatattcgtcagcgggtggcgtcccgggcgccgatctggtatttaactccggatggggtggtgcaatatattgcgaaatatggtctctatcggaaggaagcccagcaatgagtgaatcagattttcccactcgtgtccctggtgaacaggcgtattcgccgatttcgaaatatgggcagatttccattgccgaacagctggctcgtcttgaggagatccgcaatggaggacgccgcccagcttatcgccctcagacctcgtcccaagagtcgcaatggggacagattcaagaaggttttagccaggtagaaagcgatttgtcccggcagttacggcagatgcccccggagaagcctagccatccacagcgcaccctcagtcccgatcaggatgggcgtagctgggtgcaggagtatcgcgaaaagcagcggatgcgtaaagttgcacaggaggcgcgggcacaggccgaagcggatttgcagcgactacttaaagaacgcgaagaagcgcaagcgcgggcacaggaacaagagcgtttagccgctgaggcagcggagcgtttacgcaagttagaagaggccgagcaagaggctttgcgcactgctgcccgggagcagcaacgccgcgaacagcgagttttagatgcccaggtggcggaagaaaaaactgaagccgagaaaatggcggagctattggagtctttccaaaatcccccggctgcacccgcggttccagatgttgctgagcccccggctacggcattgccggcggtgccgattgtgcacgcacctgcacctgagcagacggtggcagcaccggagtcagcccctggtgtaccagtgtctgctgaggaagttaccccacaagcgcctgccatgccaatgtccgccgcaccccaaaccttatcgcaggtatccgcccgtccgacgccgccccctgcagtttccacacaacattcggggattaccccacaggcacaaccggttccgggttctgctcaaactcctccacgtattttcactgatcagcaaggagctgcgggacataaaccagccgcgagctctgctgctaccagtggttttgatcaacccagtgtactagctgccggctcgcccgatggtgacaccacccaaccgattaaagtaacccccattgattctttagccgatgccgctgatgatcgggcgttggcagatcagctagctttggcctctggaggcaaaccggtttctccgcggggatctgcgcctacagctgcacccgcgcctttcacgcccgccgcagcgagtaagcctgctcccagcacgttgcccacccagtatgcggcgccggcagcggagcttgcccagcaacgcggcagcactcagcaatatcctgtcggttcggctgataatcttgatcgcccgcagctgccagctagtgcaactaccagcgtaaatatgcctgccgggattgcatctaaaggtggtgcggcaagcggagttcccttaaatatagctgcggctggggcaggatctgctgccgagttattccagcaggcattggcacaaacccgccaggccggggcgactacggccgcccctgctggtgcagctgcagcaattgcctcgaacttggcggctccggcacccgcgtcgcccagggttacaccagcgccgacgtctcccgatgtaacgacctctgcaagttcttcccaggtagcagcgtcgccggcaatagtccccacggcagcgccggtatcaccagctaagcagcaagcggctcctttagcagcgcgcactggaagtttggcggagcaaagcggcaaccaggtttctccgcgtccggctccggcacctccggttacaactatgcagccgtcaccgggcgcagcacttgctcccgctgccgcgcaaccagcgccgacagtgcagccggcttctgcgccagctcctgttgccgggcaggcagcaccgttagctgaaatcgatttgccggcggctgctgccgataggcaaacagctcctgcagctcgaccggtggttatggctcaaccaacggctcctgcacagccctatcatcctgccccctcgtcggtaaaagccagccctgccgggatttatggtgcgcaggtaagcccgatggctgcgactactgcggctcccgcgccctctgtgcctactgtggcgactcctgcaagcccggctcctgcagtggctgctccggcggctgaggttggggcagctccagtacaggaagctgtacccactcaggcagttgctccgccaataactaccgcggcgccctcggaaagtgaaaagagtgctccgccatctacttccgaaagcgaggagcctccggaagaagaaaaaacccggtggtggcagcggaagcgaaaagcaaaaaaagctgaggccccggagccggaggatactcgctacggggcgtcgctagaatccagtgaagaccagggcgaggaagagccgctaacatttatccaaacgttcttgcgttggacgttgcggctgtcaatcttgctgattatcgctttgggaatggtattgaccatggatcgcccggttatttctcagacaatggggcaggatatggtgcaacccggtatcgtagatgaggtaagcgttttacagatataggagttcttcttggtcgataagcctgaaccgcgccaactggcagagatagctgccaaggctgccgccagcaaactggcaactgatgtggtagccatcgatgttcatgagcaaaccattatcactgatattttcttgatctgttccggggataatccgcggcaggtgcgggcaattatgaacgagattgaccacgcctgtcacgattgcggtgccgacccgatgactatcgagggcaatgacgagtttcgctgggtgctaatggaattaccgggggtaatcgtccatattttcctagctgaagagcgggaatactacggtttggagcggctgtggaatgactgtccgcgaatcgatttgccggatttggaggaagccgctcaggtggggagggcgcaggctcaatctccggacgcgcagcaggacgctgaaaatctgattgttggtttagagtaggcgattcatggctactaagattattttttggcgacacggtcaaactgactataacctgcaaggacgggtgcaagggcaggttgatataccccttaacgagacgggtattgcccaagctgaggcggcggcgaaagaactggtgaaagtaaatccggaacggattatctgttcggatttgcgacgcgctcaggcaaccgcgcaggcgctggccgatacttgcaaccaggagattgcaccgctgccggatgaacggttacgagaacgggcattcggagattttgagggactgtccgcgaaagaactaaaggcaaggtttgcaccgcgttatgaagagtggcgagctaccggagaatgcccgatggcgggagtagagtcgcgcgcggaagtgggctcgcgggtcgctaaatgcgtacttgaatattttgagcaggttgagggggtgctagtggtggtttcccacggttcggcgcttactcaagggctggtgaagattctgggattggatcctgtggcctggcagggactgcgcggtttagataactgccactggtctacgttgattccttattcgcgtgagcctggatggcgtctggtctcccataatctcggggttgccgatcctgccggctcggcgctgccttccatggcctagtcgctttcggggcggtttacgctggctgaaggcgggtatgtcgcaatacacaggccagagatttgaagaagaggcaccctgttagttagagttatttggtgcctaccgagcaggattgctgcggtagaaatagcttggggctatagcgcagttggtagcgcgcttccatggcatggaagaggtcgcgggttcgattcccgctagctccactaactgcctgctggagttgatacaatttcgcgccagcaggttttgttttgtcattttgctccaaaaattgctcgtttgctccaaaataggggttacgcgaaattgttgtgttgagctgggtaaatagaaagccagcaaccgaaatgatcggtgctggctttctatttggggagctttctggctattgcgcttgtgtgctggttccgtctttccagatcacggtcgctttgccacttggtgctatctcgatgcgttggcacagggcgtggaaggtggcggggttaaagtcgcctacactgtctagtgtggtgagggtgcgccggtagtggttgagtgtggctttgatgcctgtgcgccgttcaatctccgccgtggttgcttcgtaggcggtaatggtttcgcgctggcgggtttcgagctgggtgaagcgctggtggtagtcgtcttgattttgggagtgatgcgcattcgcgttgatagcttgctcgatcagtttcgtggcgatttctacttcagcagcttgctcagcagcttgggtttccagctcgctagtgtcggtgagtacagcggtgaggagtttccagtcaatgaggccgcgttgctcaatgagctgggcgagcgcgctctggaacatggcttggagctgttcatcgcgcaggatcggcattttacctgggtgaggtgtagagaatttgtggttgcattgccagatgacggcgcgatacttgcttgtggagtgccacgttttgctgccataggctgcgccgcagtgagcacagtaaaccttgcctgtgaacactcgctcgcgtcggccgttacctcgagccgcgaattccgcttgggtgagttcccaggtttcagggtcgatgatggctgggtgggagtcggtcacgtaatactggggcacttcgccctcgttggtttttacagccttggtgaggaaatcgacggtgaaggatttttgtagcagagcatcacccttatatttctcgttggtgaggatggattggatggtggtgtggctccatttgtgtttacggcgaggggtcagaatcccgtctgcatccaatgctgcggcaatctgcgggatgctcatgccttcgaggtagtggcggtagatgcggcgtactgtttcggcctgttcggggttaatgacgggcttgccgcctgggccgcggtcgtagccgaggaagttcttgaatggcatatttactttcccgtcggcaaagcgtttgcgctgaccccacgtgacgttctcggagatggatctggattcttcttgggcaaggcttgacatgatggtgatgaggagttcgcctttggagtcgagggtccagatgttttctttctcgaaaaacacctccacgcctttatccttcaacttcctcacggttgtcaaggagtcgacggtgttgcgagcaaaccgggagacgcttttggtgacgatcaagtcgatgcgaccagctaaggcgtcggagatcatgcggttgaatccctcccggtgtttcgtggaagtgccagagattccttcatcggtgtagatgtcgacgtattgccagccgtcgtggtttttgatgtagcgctcgtaataatccacttgcgcctcatacgagttcgcctggtcagcgtcatcggtggagacgcgagcatagccagctacgcggcgaagcgagggcaaagccgtgggtgaggtgtgtatctttttggtggcagggatagcggtaatccgtggcatcaggcagtcacctcctcaccgttgcggtagtcaaccgtggcagtgtttccactactgaggtggatggtcaggagccagtttgggctggcctcaattcgctcgatccgatcaaccacctgctggtcgtcccaagcatgaagcccaagcaggcgcttgatgatggcgtacaggtgttcttctcgtagttgatgaacatggcaggggttgcccttgcccttcgtggcggtttcgcaccaccagtatttataagtcgagtgcgccaagcggcgggtacgccgatgatagttcctgccacagatagtgcaggtgatacggtgcgtaagagcgctactcccaccggttggggtcaagccgcgtccgcccgtggcacgccgcctagctagctctgcctggacggcatcaaaaacgctacgctcgataatcggtgggtgggagtcttccacaatatatttatccagctcgccacgattcagagtcggtgtgttatctccggcatgagcactgaagtactgttgcaagattgcggtaccgatataggtggggttttccagccaatcccgggtcaccgaggcgcggaacttgccgccaacacgtgaacgcaaaccctcttggttcatttgtttgcaggttttctctgggctgatcccttcaagaaactcgctgaatacacgccgcacaataacggcttcttcttcaacgatgtcgagctggccgtggtggtagtggtatccgtagagttggcgcgaatgcaacagcccatccttgtacttttttctgatgccccacttcgcattagccgagatagattcggattcggcttgcgcgaacgaggctagtaaagtgaggaggacttcgccctcagcgttggcggtgtcgatgttttcacgttcaaaacgcacgctcaccccagcggctttcagggctcgcacagtggtgagtaggtcgacggtgttgcgggcaaacctgctaatcgatttggtgagaataatgtcgatgctccctgcgagtgcttgctcgatcatctggttgaactcgccgcgccccgagatagacgtacctgtcgttgcgtagtcgctgtagaccccggcgtattcccagcctggcgttgagctgatcagcttgttgtagtaggagacctgagcagagaacgagtgagtgaggcgctcggattcgcgtgagacccgcacatacgccgccacccgcgtgagcttcaacgctgctggtttgggtggtagtttgcggattttcatgcgcgtctccttgtatcacgttcggtgtgaacctttgcttctatacatcactctgaagcccagatttatccagccgctgcggcaataacagcgccataatcgcaggatgatacgaaccaatgagagtatctcgtatccgctgataatcaccctgacagatggcaccagctacgcggagtttttcggcaagtgcgagcgtgaccctgcagactgcctcatgtttcatctgaaccgctttcatgccgtgcctctgtgggtcacgtagcaggcatgggagcaatacttgcgtttcttgttgccgtaggcagtgaatgtggttgcgcagccagcgcaggtgaaagtatagatagcagtgcgccttttcgcctcagggtgtgctttccaccaggcacgccgatgctcgctacaacagaatcgctgctttttgccgtcaaggcgtcgatatagacgacccccacaccacgggcaccaaccgagcacatcatcaggaacacgggtggtgcttgctggaaggtcattaacaaaacgaagaaccgatgttggtggcaaacccaggatctggctaatgcgccgatatggtacgtggtcagcgtgcaatcggcggattgccttttgctctctggtatcaaaacccatagcatgctcctaactcgatgaacttgctttcgctttaagccaccccagaagcccaatccggacggtctatttctgcgatggcgctatacgtccgtgaagaagaggcgaaccggatgggtagaaacaaaaaaagagccaccccagcaagacggtgacgtctcgccagagcggctcttattcagcgtggttattcagttgttgccttcggctggttagccaaggatttggttgactcggttttgtacttgttggtagctgtagccagcattggtgaggcggttgtagcgttcttgcccgttaccccaatccccacgaatcacctcacgcgccagggtctcgatggacttgcccgcaggtttggatttgagcccgaggatttcgttgacgcgggcttgcacggcgtcgtagttgaacccggccgcggtgagtcgctggtggcggtcattgccgttaccccacgaaccattgatgacttcacgtgcgagagtgtcgatgctcttgccaccagtggtggttggcttcgaggcaggtgctggcgtagcggatactttgctggaggtcatttggtcgtaccagtagccggctcttgccatgtaagcggcgtgttgggatccggctatggaggcggggcattcggttgcggaaaagtcgcggtgtccgaatatgtttttgccccaacagggtcggccgagcttgtagtagtgacacagggcggcgaccaggtgtgccccgttttctaggcaggcatcggagatgcggtaggggtgggtggatgcgtctgcgtgttcgattccaatcgaggtggtgttggctacccaatttcccgcgtgccaggcagtatcccgatcccagacgagttggccgatgcggccactggtttctacttggtagtgcgcggaggcgggtcgggtttgccatacgttccagcatccttgtatggaaaggtttccatcgttgtggtgcaggattattttgttgatggatcggccttgtctgcctttggtgaagtgtttgttcatcaaaaggttcaggtcagcttctagagtgttccagttcttcattttgggttctccgtttctttgttggttggtttagccggtggccaggataaaaagtgcgagcaggtagataagcggggtcagtatccatgaaaggaataaggcgaaaaggagccagatcccggcggtaagtagcgttaagactgctaggagtgccaggaatttaagaattgttttcatggtttttctatttcgtcggggagggcgtgttggggcagatatttgcccgggctggtctggcctgcctgaggggttggcggggagtatttatctggactgctcgccttagcgggtggtgttgagctggtttttaaggcgggctggttttgaccggtttgcttgattgtgtctaatgcttgttttagtccgcccgggatcggcagacctaacagtgcagcgttttcgaggacggagatgccctcgttagataggtagaagaagatggtggcggtgcgtagcactccgggggtgccaagaatatgcacgtctaataagtgggctagtccgatgagggcgaagattaggattttgcgggcgataccgcgaaaccctaccgagctggatagtttgtgggcgttgattgcggctagtattccggtggcgtagtcgatgatggtgaaggctacgatggcgtagagcagggagtcggttccaccgaggaaggctcctagccaagcacctatagcggtgattacgccttggaatagcgtccaaatggttttgatagacaaaattcttgctgtcctttcaaaatagttaacgggttagcacaagcgtgggggattgcggatataggaaatgcctgcacaaggcaggcattgaaacttcaaacaaggcggtgctattcggtttgtatatatgggcgctttagggcttgcagcgtgaggcgggtgatatccatagtgttttttctaggtatcaccattatgggattgtctgtgttttttgtttttcctggcggggctggttttgggtcagaagggatcgggattatcgcttgctcaatcatgaggtttctcctttgcttatggcttgttctactgcttcgcttaacgcgcagaatgcttctgcttgttgcccggatagctcaccgtcataggtttctatgaggctttttacttcttggagatggttttggtaggtaggcccagatacttcggccagggaatcgaataggctttgacgagcggcgaagaattcttgggctttttctgggcatgccagggtgaatgttcccccagcatcgatgcggggtttgccgttttcgtttagggaggcgtattgggttaccagttcgtattcgtcatcgctaaaacgcttggtggcctgccgtactagctcgagcagtttggttctagctctagaagggccaggtttaagactcatagcggctaatagttctgttagtccggttaggtgcttgttagctatccaaattttcatgatgtattcctttcttgaatacagcctggtttaggcagtgttggtagacattggttgatacccggtgttatggaagtaggtccaggagatggtgccatccgctttggaggttatggtgctgatccatccctggttaagcagcccgatgagcccgtttacccggatcataaggtctgagagccggtcgaaaagtcgggtcatgttatagaacgtgccgttggtgacgatcatgacgtcataggtgtggaatactactttggctagctttgtcggcccgacccatcctggatgcgtgcccctatcggttagtacacaatcttccaaggtgaccgatctgttttcggtggtatagaacttgtaaccattcgtgcgcagatcagccccaaggtggatgccagccgaatcataaaaccgtccctttgggtctagggtcaaacacgtgaaatagtccccgtttggagcgtcttggtaggtccaggcaacatagtcaccctcgttggctagcgacgtggagataccctctatttcctcatgatcctttttatggcccctgcctaactgtccgatatatcgattcccgtaccaaaactgcatcccggtactagcgatttttccttccagttccgaaccgttataccaagagatctgggtggggttgatgcgaatattacttgtccacccggcaagaccaacctggatcgcgttagcggaaagcttatctgccgtaatggatgccgcagcgatccggttggcgtcaagcagaccagtggtgatcttgctggcatctatgtaagcaatcttcgctgaagttattgcagcgtcgctaatcattactgtttggatgtatccgttagcaatcgtgagcttatcgctagtgatgctcccggcagcaatccgcgcggacgctagggtaccggtggttattttatctgcggacagctcaccgattttagcgttagtgatagccgcatcggcaatcattgcggtaccgattacggcgtcatctattgaggtttgcccactgatgtgtacttttgctgcatcaatcagcacggtttcattcgacagattgatttgggtaataatctcggctcttttaactctcaggttcacgttgtctgaaaccatcgtcaaggaggagttaatgtttttggtttcatctgctacctgcactttgaacgcttctagagcattttgagtgctggtagcatcctggagagctttttcggcttgagcttttgcagtcgctgtatcgctactggtttttactagctcgctttgggtttgtttaaggcttgcttggacttgctcaacgctagcgtttgcttgcgcgatctgggttttagctgcttgcaggttcgccgccagttcggctccgttcaaatcggtggcaagacttatccatccgggctggccagtatcggtggccttatagatccagattcctacttgctcaccattttctttaaaccacacatccccaagccgggcggatactggttgggtggtgccatagtggttggtgtttttcccgtccgcgctagctagcgcaatacttgccacctgctgggcttggatagcctcgctgcgggcagcggtgatggtgtgggtgatgtcggtgaatttagaggcggtgctacctagctcaatgcttatatattcttggccaagcgggttgtagtcataggccaggacccgcgaggttaactccacgcctaagtcgctatgacgtacggtcacgctatcacccaaggctagggtttctacctcgcgcagatctgcgtattctttggcggaggtaaggtcaacaaatgaaatcttgtaggcacaagatggctgatcaaccaggccaagtttgtactcgcttttggctaggtcgcgcagccatgcgtgtgcttgctctaggggcagttcgtcctcacgtggcttgcctgggtctttgatggccttgacttgcccatagcggattaccttgatacgcggcgcaatatagtcgctgatgcgagggctgtccacgtacagttcaggtaggagcagaccgtcgtaaccaaccggcaaaatccgggtaactatggtggtgtagtccaggctcgattcgtatccggacaggtttttacgatcccttataaccacgccatgattagcacctatgcgcggcgcgtggtggatatgccagttatcgaaagtaagctcgccgccccaacgcgaaataaaactgttgtcgctgtcacctaacaaggccgcgctgagtggggttctaactatgcgggcagaggatcgatgggagttatcagaactactggcgctaaaaccgtgcgggctattggccgcccctagcagctgatctagggctgcttttgcggttttatttaccacataggtgtcagcgataaggtttgcagaaaggtcatagaacaggtgatgggcaactacttcgagcgtcccgtcaaggctggtggtgacttcgctgatacgaaatccttgcctaccgtttattcctggaaccggggcggccacgatgttttctattaccaacaggttcgctgctggcccatcaagggggtaggaaaacgttagggaaaactttccgtttagttcctgagtgactttcgggtctataaggtggcgatctagcaccgctaacccactggcagtgaaatcgttagcgctacgatcgtgaatcgtaatcatctggttagtcctttctacaaggtacgccagttacctttaacttcgattcttgaaatacctgtgcccagctcgatgtggttagcaccaggagaaagttgcgggaacggccctgaaatcccatcggtttgggttttacctgcaacgtgggctgtaagccgggcagtatcgatagttaattgcccgctaggagcacaaactatcaaagcagtatcgtttatttttagttccaactccccggtaccaaaaacagttattaccggatcggaagctaaaagaccaggattactaatcgtgcccgaagcgctcaaagttagctgtttaagcccggtttccaggtaggtaaacggctggcaacaaagctcggcttcaaacattacccaagtggccagcgagcctagcgctggtgatattttgacgtgtttaagatacctgaacatgccaggctcaccgctaaacccaatcgtgtgggccccagtcagcgcgtgagcggctttgcggtatgcttccagcccgccacgcaccgctagtttcaaagttatttcactgtcttgccaccctttaaagcgggtaagagtaccggcccgccctgacacctcaatatcctctatccccatggtggcagtagggatttctacaggtgcgcaaaaacggatacccaggcttttagagctaaccttatggtcgagaacaaacccgtacattgatttacacccccgcagctagcagattggctcgccgagatatccgtgatagttgctgatcaattttgggtgcgagtttgccgaccagcgtcccatcacttaaaacaaccttgatatccaaacccttaagaatccgggtagctgtagcatctgctaccccttgaacatcaacgctgcgagttttagtttccttttcagtttgcgatgtttggttaaccggggcaggggtgagatcggtgcttggcaatgacaaatccttactgaccttgataggtacgttaaccccgttagttaactcgcccatagcgtccatggtgtcttttgccatgttcgctgccgcatctacagccttatggccgcgcgtggttattgctccggctagaccagcaactagcatgtcaccaacccacgccatttgcttagaaggagaatggataccgaaaaacccgagaatcccattccagattgaagacacccagttagcgacccggttccacaaccagcccgctagtgactgaataccctgccataacccagaaaccagggatgccccagcgttaatcatctgtccgaccccgcccatcactgctcgaacaatgccgtaaataatcctcgggatagccgaaacgacagtgccgataatggtcggtaaagcccgtatcaggctggttaatagttggatgccagcttgtacaagaagggggatagccccaccaatagcagacagtatggcagagatgatttgaggtaaagccgccacaatcgcgttaataatagttggtaacgccccaataagagccgtcaacaattgcacgcccgcgttaatcaactgggggattgcctggatgatcgcgctaaggatagaggtaataatcaacggcaaagccccggtgatagcggtaataatttcaggcaaggcaccaaccagcgcggttaacagctggataccagcttggataatctgggggacggctccgattacgaaagaaataatcgcaccaatcaactccggtagagcctcaacaagcaccgggatagccgcaattaacccctcagcaagaccagtaattaactgcagggctgcatccaaaataagtggcaaattatcgatgagcccctggatcatggtcatcagcatttctaccgccgccgggatcagttccggtagagcctcgccgataccagctaccaaggtggcgataatctggaccgctgcctccaacaggctcggaagtgcctcaataattgcttccaccaatgccacaattaacgtcacggcagtgtctgccaaggaaggcagaacagcgataatgccctccaacaaagaggtgaggatactcatcccggtatctaccacttgcgggagctggctagaaataaactccagggcttccttcaagatttctccgagggtgtcgataaaggccggtgcgcccccggtctcgaacgcttcggtgagttcatcgacccaaccattaaccatcggcatcaccgtgccggccaaagccgtggtcaaacctccagcaagtaggcctttaaggttatcgaccccgtcttttagcgtagctagttggccagagaaggttttggattgggcatccatcgccccataaaaccggccaccctcacttgtggcactagcaaacgcatccgcaaccatatccgcactgatcgcgcccttagccatctcttctttgagctcaccgatacttttaccggtcttacgggaaatctcctctaaagggttgaaccccgcgttaatcatctggttcaaatcctgacccgtcagcttgccagtagagctcatttgagcaaacgccaacgttagggattcgaactttccagcatccccctggctgatatcacctaactgtttgaggcgtacctgggattcttcagcgctcatgccgaaccccatcaacgtttgggtggccttggctagatcctccatcccaaatggagtacgagccgcttccaacttgaggttattaaccagtttctgagccttggcttgatcacccagcatcgtggtaaacgaggtggtgtattgctccatccgggcgttatagtccaaaccatccttcatcgctgagccgaagcctttagcgatacccgcgatggcgtgcccgatagctttaaccccaccaacaacagcttccgctgccaggctggctttaagcacgtcaccaaaaatgcgggtcttcgaactggtaccgtccatctgagagcccagctcatctacagcattttctaggtgtccggtgtccttagctgcagttttcgcatcatcacccgcaccgtcagcctcatcggcaaacttggaaagagcagaattattctctttaagctcaccctcaagaccattcaaagtcgcctgagcgttattgagctgaatctgccaattcttcgtccgagaatcattttccccaaaactggtagcagagttatcaagagcactcttaagggtctggatcttggctttttgcgcctcaatctctttgcccaaaacctggttacgagaagtcaacgctgaagcggacttatcgttcttatcgaactgagaagccaccaacttcatctcggatcccaaaacccgcatctcacgattaatatccgtgatcgcgcgcttaaactcccgctcaccctcaaggccaatcttcaaaccaaaagacgaatcagccatgacgggatgtcacctcctatgggacactggaattgtctgggttagcggatgaagggatgaaccatggaaacgagtgcagaagacaccgaggaaatgcgggcgtatgagctcgccgcagttctcggcgagttggcagatcatctacctctatcggacgccctcgaagcagcgacaatgcaggaaagtgggcgctggtggttttctcaacgaacccatttgacaggctgtttagcaggcaccgcccttaaggaaaattgggaaggtgctattgctaaaaatatttggtgtaatcagcaaaagctcaagcgcgtggatgccaggctatgggtccttgaggctctcggtctcgttaccgaaaacgatcgttatatcctcgaacaccttttgaccatgcataaagaaagaactggcggtcaccaattcaacaaaaaagcgttcgagtatttgaatgaacttttcccgtgggacttaatcgaggcaagagcaagagaacatcaaagaaatctcaagaaaacagataaggctagatacccgctggaattacgtcgtcgataaaccagaggcgagcaggtttggctctgcctgtttcgatgcgccagcagtccaccaggtccaatagttcaccgaatatggtcaggtcgatttgtctgcgggttagtcccaggtgggcgagcccgatataggtcaggcgggtaaagattgcctcgtcactatctattaggtgtcctttttcttggtttgcccttttgggtctggggtctcggtcatgattgctcgccgggtgccgcgctgtaatgcctgggcgatagcctcccgatagtcagctaaatctgcaggcacagttagtaactctactgcttcttcggtcagttctgggcgcttatcgtctggatgggtgaggttgtgtatttgtacggactggttagcgagcagggcgataagccagattacctcaccgagtgacttatccatatcttcgctagtttccagggattgacctaaatgttctagccctccgtaacgttgagctataaggcgggtcgcacgggtagtgaggacgagctcgtattcttgacctgcgatagtgattgtcgcgctctttaaagcggagctacctgtcgggctggtttgggttttcgctgtcatggcttacctgctgttctagttgtttgtcggtttaatgctggttgtagcggcaggctcatacacctgcctgtaccagctggagatagtctcagctttcacgccggtggctccttcggtgacttcggctttccacgggtgcttgccggtagcgtctggtttattacgccgcagaatcgttccctcaatactcggggtagagaacgtgatcgaatcagctttggtcgccagcgtggttcccggcagagcaaatttgacgcggtaaagccaaaaatactggtacttcccgttagagcgtgcagctctaaaaccaatagccacgggtgtgccaccatcctcagaagtgctgataagtaccccgttggcgtccagtctcgcaccagttaaggcagctgcagcctctgccccgagatcatcaaccccaagagtgagcgttccagatttgaattccttgacaatctcggatgccccgtcatcggcatacaaaatcgcctcagccacctccacagacaattctgcagatattgctttagcgagcggtttaggaacggcataggtttcctcaccgctagtgggatcctcagtgatggttgcgtagtagagcttgtctaaaccaatagttgccatgatgtttctccttttgggtagtaattttcgtgacatgggtgtctttagatgtcatcgagagatagaattggggaatgagagagaaaaagcgatgcttgacctatgcggtgttcgggatttatctgctcttgttgttgtggatggtgctgttcaaattcgccaccagcgttgacgacatactgggcatgcggcatgggcgctacttaaatctgatcccatttacagattctgcgaatctttacgggtcgaacttctttgatgagatcgtggtcaacttccttattttcatcccgtttggcttgtacatgaggatgttgttgaaacggcgctcatggttaattcaattgctcccaccgtttttagcaagcgtggcattcgaggtcgttcagtacgttttcgctattgggatcagcgatatcaccgatgtcataatgaacactgctggagccgctactggcttagcagtttttgctctgctagccagattctggcctgaaaagagcgaaaaagtcattaacgtcatcgggttagtcctggagatcttgttcatcggatttttgactttcctgatcattgcaaactcttaaggacaggctctaaaactcgaaacatcgatggaatagtggtgaaaaccggtatccgcctcgtatccgatatagcgcctgcctgtaataaccaggcgagcgctgattagagctttcgtgatctggtctcttagtgccaggtagttggttttcgtgaacaggctgattcgggcttcttctatttcgacgccgggggtgttgtcggcgaagatctcgaaagaatctgttaacggggtgaatactagatacgtgtctggggctggggaggcggtgtagcagctgactgcataggcgagcccaagttgtttagcgatttggcttaggttttctaaaagcccgttcatggtttcacctgctgaattcgcgcggccagggtttgtttcattgcggtgattgcggctcgcctggtttgtgaacgcgtgggggctaggaagggtctagcgggctggttggagcgtccgtgttctagaacgttagcgattagtgcgttagctctaccatcgtctcggttctcggcgaaaccaactttgacgttgtagtctcctcggctattgacttttactggcgcggttcctaacgctttggcgagctgtccggtagagcgggagggctgtttcgttgagctgccgatggcggcagaaaggttagagcgcatacccggctccactatgttagccccggctttaagtacttgctcagcggagttatcaatgaggctgctggctgagtcgagtgcgtcaatgaaatcgttgggaagcttgatttgtactctagccatcagggtgctccttctgcttcggtgcggtgggcgaggatctcgatatagcggccgaggtattcgacagcatcaatcacacacctgccacgtgcggagctgatttgcattgcctcggttatttttatgccgggtattgctcggatcctaaataacaggtctgctttggtgtaggcggcgcggttgacccacgcaccacttgcgtgccgcacttccatatatgcgcgcaccgaagcaataatctcgttaccagtagtggcgaacccggcagcgtctttagtaaccactggctgtatcaggtcgatgtgctcgctcattttgcctagcgttgccatggggcgcgtctttctttagattttccagtcccgatccagacgaagcagggtgttaactgcgttccacacggcgcgggcagcatcggttttgtctgcccaaaacccggcggttgctccatctctggattcatagaaatgggtggcgagcatgataatgccttgccgggttgcctgcgacatgggctccgtttggtagtagccctcgggcagatgttgataagcggtagcgtaggagatggcagccaaaacaaacgaggcaatcaaagaatcatcctcgctatggtcgaccagcagattctgcttgactaaagccatgagttcgtctgttttcatggctgccacctcctaactatttttctggtttacccggcggtcttctgggtaagaaccttgatcgcctcgggcaagacgagcttgccgtctaggcgttgggaggcgaggaacccgatctgcccggtggttgcaaatagctcgtttaggcgtttgaaggagcgaccttgccggtcagcaatccaataaaaaccgaggtcaccgaacgctactgtgcgcgccccggctttgacctcaggtgcaaaaacactggtgtagacgggtcggccaaggatcatgtctggagtcccagcagttagggctggttgccacaggtactgcccgttaccgtctttgagcttgcgtacggtctttactgttgcatcgttcatcagccacaccgcgcgcgcccggtacggggcgcgcaaactatagtgcagatcgatgagttcatcagcgctaatgtcggtaggcttactggtggtcacgcctaagtctgctccgccggtggggttgaagataccggtgggtttacctttaccatcgccaaccaggaaggcttcttcttcagcagctccaatacggcgagcaaactcgctcgctaggtattgttcaacgttaaatgctgcgtcgttgagcagttcttcgctgattttgaggaaggtacccagcttgaacgccgacagggagatttgggtgaaggcttcatcggattcgttgtatggtttgccttcatccagccaggtagcggtgccatgggtagacacgaccgggattttacgatccccgctagtggtctggataaccttggcgagggtgcgcatgatgttttggtcggctaaagactgcactagggtgcgttcgaactcgtcaggcactaggtatccgccctcagaatccaccccctcgcttagcgcattccttacttccatgggggaggtgttaagccgcatcgcatcccaaaacgcccgcttgtaggaagctgtagcacgggcaggcttgaccttactgtcttcgcccatggcgcttccaggagcggaagtgatgggattacaggtcgccttggcaagagtgttttctaggtgttcggctcgctcacatcgagcaatctcgccgctaagtgcctcaatctcggcctccattttggcgtaggccgcgtcatcttcggcgtttagacagccagtctcgctatcgcgccgctcatctagaaacttcttagctttattccaggtttgggcacggcgggtatacaaatcagtaacagtagtcataatggaatatttcctctcttagttaatggggttggttggttaaatgggcgtataaatcaacaacccgccgaccacaagaggcagcgggctttaaacaaggatgctcacttacaggaggcggcggcccgggaggggcagcacttttaccgtgcatatctagttgggcaacaagttgttgctctgaaacctttctggaaaacaccacgccgcgctcatttttcgctcgccccggtactttcttgctcgcggattcttcatcctctccatcaccaggatcatcacccttgtcaggattggccttattgggttcgtcatctttgtctggaatagagccctgtttactggtgaggattttatttgcgaaccccaagtcgatagcagctgttgcgtccatccatgtctccatatccatgagcttggacagtttcgcccgggacaggccagtttttagctggtaggcgttgataatcgagtctttgaccgattcgagcatgtcgagggcacgcgacagctcggttttatctcccatagcgagcgtggcgggattatggatcatgagcatcgaaaccgggctcattgccaccgtgggcgccgccatagcaatcacagatgccgccgatgccgcgatcccgtcaatattcaccgtgactttatcgggataatccagcagcatgttgtagatacgagcagctgccactacgtcaccgccaggggagttcagccagatagtgaccggcccagaccccgcgtttaactcggaggcaaaaaccgctggggttatgtcctcatctagccatgattcctcagcgataaccccgttaatacgcaaaaccctttcacccccatcactgtccgggctggtttcctctggggttagccagttccaaaaacgcttcacattctcctcctcaatagttggttctctctaggttcatcaccagactcgccttctttagcttgttgtgagtcggcataagccccagccataggaagcgggagcatgttcccgttcaccaggtacagatccccgccatcagccgcctcgatccggtcaaggttttctaactctcggatatcgttggcgctcatccacccgttttggcgagctaccgcgtatccctccatacgtgactggtaatccccgcgcagtaggccctcgacattgaacttcacaaacaactgctgcttttcacgcgggttcaagagagttttcgtgatggcttgttcccagcggattacccacggatcaagcgtgtatttcacaaactctaaagactgctgttcaatattggaaaacgaggatttttccaggtcgccaatcatgtggggcggaatacgaaatattcgggcgatctcattgagctgaaacttccgtgtttctaaaaattgtgcctgctccgggcttaccgatatcggcgtgtacttcataccctcttccaaaacagcgactttgttgccgttacgagcgccaccgaaggttgcctgccaggattcgcgcacccgagaagggtctttgatcgtgcctggatgctctaacaccccgccaggagccgccccattagcaaaaaatgaagcaccgtaatcctcggtggcctgcgcgagcccgatagcgttttttgccatcgcgatcggggaataaccaaccaacccatcaaaaccaagacctggaacatgaagcacatcgttaggggtaagacggatggttttatactctcctgcgggttcgtcccaggaggtctggtactcgtaatacaaagccttgctgtctagatccctgcctacgctcatccgattcggttgcagcggatacagtccaatgacttcgcctagaccgttacgcactacctgagcaaacgcattaccccacaacaacaggtgcgtcatgagggtttctctaaacacgaagctcgtcatctctgggttaggttcatcatgcaacagccggtataaggggtggtctagggcttttttcttgccgccaccgtccttgtaacggtagacgtgcagtggtagcccggctatcgcctcagccaagatccgcacgcagccatagacagcagtcatctgcatcgcgctacgttcggtcaccggacgcccagcagacgtcggcccaaacaaaaagctgtagctggtggacagctggtgattctcgactggtttcactctgccgcgtagccagttgaataggcccatggtttttcccttctgctcatgaaaaaatgagtgcatgcaaaggtggaaaagacgcggcacctgcatgcgctttggcgggcttttcgcgtgctatcttttactgcctgctctcatgacagccgccatcggagtattcagcgcccctgattcaggaatgacgctgtttatcttgatgctgttcatagcgtttccactcgccactattgcgctagccgcctgggacgcagtcacggagggattcacggttttatggatagtgatgccgatactgtttttcatggtgcccacggttatctttttcaacgaatccgcgctcatctacggagccatctattcagtgctagcaatagtggccaatggtgtcggtagcctgtttcacccaaaatctcacagcaccaatagtccccgcgaatcataaactgagctcgcctctggggtattgccgcacctgattgcccgatccaaggccatgatggttgcgactacgccgtcgatcttctccgtggacttttgcttatctggcttaatgttgcctgccgggtcggtgcgcacgtgaatgttatcgaccatccaggccagcaccgggtgccctccatgcgccaaccgtctttcgagggcgagtttcatcagttcctttgatggtggggacatgtctttgaagccttgcccaaacggcaccaccgtaaacccggcatcctccaaattctgtgacatttggacagcgccccaccggtcgaaagcgatttctcggatattgaatcgggtgccaagatcctcaatgaacttctcgatatacccatagtgcaccacgttgccttcagtcgtgagtaggtggccttgctgatgccataggtcgtaggggacgtgatccctagaaactctgagtttgaggttgtcttcgggtatccaaaaccagggcgcgaccgtgtatttgtcatcgtcatccgtgggtgggaatacgagaacgaaagcagtgatatcggtggtggatgccaggtcgagcccgccgtaacaaacacgtccttctaactcatctaagtggactgggccatcgtttttgttccaggtgttcatgggcatccaccgcacagactgtttgacccactggttcaaacgcaattgtctgaaggtgttttcttcagccggattctgcctggcactattacaagcgtccctaactttctggattggcaccgtcacgtccaaggatgggttggctttatgccacacggcttcattagtccaatcatcatcttgcgctgccccatatatgactggataaaaggtggggtcgtgcttttgtcatctagaatgtcttgggcttttggtgttgctcgtagcagatgctgtgggtgtcggtgccggcggttgtgatcaggaagtacagcggctgggtgcgagcatccccactgcctttggtcatcacgtcgaagagcgcccggttgggttgggtgtgtagctcatcgaataccactccggaaatattgaatccgtgtttggaataggcctcggcggatagtacctggtagaaggaattagtaggggagtagatgatacgttttggcttctaaggatctttacccgcttggctagtggggacacattctcaccatgtcggctgccacttcgaacacgatggatgcttgttgccgatcggcagcacacccataaacttcagcgcgttcctcgccatcgccgcaacacagcaagagcgcgacggcggcggctagttcagatttcccttgcttttagggatctccacgtaagcggtagtgaatggcgaaacccgtcaggtttgaccaccccgaaaaggtcgcgaatgatttgttcttgccaatcaatcaacttaaaggttttcctgcccaccggcctttcgtatgctttaaggcttggatgaacgcgaccgcaaaatcggctcgacgcttgtcgtagcgcgagctttcagccatgaaccgtgtcggttgatattcagctagctgacgcatacgaatcagttaccttctgttggttaaaagtcagttgctaccggcgatagcaggtgccctcatgcccggcggactaggcttcgggcagattagctaacgcccaggcgatcgcatgtcctgcgtcagcgaaaaggtggtctgactcagcgatgagttcgagttcgcattctccgcggcctcgagttgggctgaacccgctgacgggttcttccatcaaccggtagatttgggcgttattgccaaatccttcagtcttggtcaggtagcaaaacttgctagcgtgtagcctccgtaggcaagaaccgtcccgtaggaatcaacgctcatctggagggtttcgctggtgacctttgtgctgttcatggctggtgcctttctgttgtgtaccgtttcggtatgtatatacagccatagacttcgctacttatccagtcattttccgcctattttcaagaaaacttagagatgtacatctctaggtcataacgcttcacgataaaggcaaaccccacgccaggtggggtttgcctttgtgtttagttttaacgggtcaggtggtagttgacaacgtttcctggtgtagcatgctcaagttcacgcaccatcgctgctgcccgcccgtatccctcggtgacttgttcgatgttgtctaggttcaacgctccgtaggcggtggtttgcatccgccattgatcggtttcaaaatcccggtcaagctccggggtgtagggaacagcggggaaggaacaatagaaatcgcgacccggccaggttcaatctcaatgctggtgatggtgtatcccaaccggttagcacgtccgataaggcgttcggtgttttcttcctcgacgctgcattcaggttctttggtgttcatggctgttcttatgtgttgtgtaccgtttcggtatgtatatacagccatagacttgcctacttatccagtcattttgccgcctattttgcctaataaatagtggtttacatctcttggttagtgtttacttgtggcggggttttccatgcagaatcaccgtttaatggtgcaagtaagatcttgcgtacttccttattttctttaccagaaagtccgatgcggtaaagcagggagcgcagttcatacttctcattcaccaccttgtcactcgcggcgcggtgggtggtgagcccgatgcgtttcgcatatgcgaccattttgcttaggaactcggtgtatgccgtgatcttctcgaactctggcagctcatcccaccaaggaaaactcagcccctcgctactggtggtgatgctaagctggctcgcgccgagcgctttagcgatcaagtctttcttggctgcgataagttcatgcagccttgccagctcagtctcatcaagcgtggcgggtagggtgactacgagtccgtagttttcagcctttttggtgttcaccattgctcatcctcctcaccatcaaattcgatgctttgaacgtccagccatgtgcggatgaggcgcatgaagtcgtgcgggaagttggagacaatcatttctacgtgctcgtagccgtggtcttcggctgcatcccacaccgcaccaatatcggtcaggtcgactccgaggttttcgatttcttctagatcggcgtatagctgtcccatcatcaccaaaccctctctttcttgctggttgtttggtcatgtacatacagccatagcttcgcgggcttatccagtcattttcgccttaaaatcaaggagttttagtggtctcggcgactatctgagtgagcacgagtttggcgcacggcaaagctatcccgtttccccacagcttgtataacgcccggtcagtgacgggattggcgagccattttttcacttgtgctcttgttttggtttccttcaaacctgccgctactgcccacctggcccagacctgccaccagtaatccaactgtgaatctgtaggattgctgattgctaaatctcgtgtccaatcgtcagggaagccttgtaggcgggcgcactcggtgggcgtaagcctgcgcaccctataaccgctaggttgtggcgcggtgacaataggcggatcagtaaaatccgaggcaagtagaggcccggtgaggttgttggtgcccttgcaaaagaaatcactctttgatgccgaaactaccgtgtcgactatcgcgatcccaccctgattacaggtcgggcagataccgcttgtatctaaagtttttgcgacctcggtttcgtagccgtacctgccagtccggcttttacgcttggtatgtatagcgttgaaaccataagcgatcggctcaaaaatcctctgatcgttattacaaccaagcctgccagaaatatcggtttggataagcgggcctttaccacctccaggtttcccgccatgcatccgcaacgtgaacgagcgcgctacaccatttctgctgcttgctgtttgagggcttgatgcaggattgctggtagcggcttgcccctggtcgcagcccgcctgagtattccggcgcaggctcgggggctcaaagagtatgtgtccggcacgctcgcttgcaaaatctgcgataaggaagatccgtttgcgtcgttggggcaggccgaaaaattgcgcgtccaatactcgccacgcaatactccattggtctgccacgatcgctccagctttatgccacttttgtactcgaggtaggtcagccgctgccgtttcgtcgacaaccgagatgaggttttgcaggacgctgtggaagtctgcccctttattgcttgagaaggctccgggcacgttttcccaaacagcgaatcttggatatagaccatgacttgcctttctcatttctctgatgactctgacggcttggtggaatagacccgagcgttcgccagctaaacctgcccttttacctgctaccgacaggtcttggcaaggagagccaaacgtgaccacatccaccggctctagctgactgccgtcaatgtcgcagatgtcgcctaggtgttgcatttgcggaaggcgcgtggtggtgaccaggatcgggaagggctcaatctcacttgcccacaccggcactatgccaaccttggtggcggcgagtgggaaaccacctgagccatcaaaaagcgagccaagccttaaagtttgtgtcaagggttagcctttctgcttggggcggtcgacctctttgaccagatccaggtaggcgtattgcccaccgcctcgctcacacgtgatccctgctgcgtctccggttgcttcggcatagcggcgcacaatcacggaagcgtatttctcatctagctccatgcaatagcaagtgcggtctgtggcttctgcagccattagcgtggaaccagagccagcaaacgtatctagcactatcgcgttggtttgggtggagttacgaatcgggtaagccaacaggtctagtggcttcgaagtcggatggtcactgtttttgcggggcttggcgaaattccacaccgtggtttgtttgcggtcggcataccaagcgtgagagccgtctttcttccacccatacagcaccggttcgtgctgccactgatatggggaacgaccaagtacgagggagtctttgacccaaatacaacagcccgacaggtagaaaccagcatcaagaaacgctttacggaagttgaggccttcggtgtcggcgtggaaaacataggctgaccctcccttatctagggatgccgccatgttggtgaatgcagctagtaggaactggtagaaggtgttggcgtcttgtttgtcgcctgcgattttcaggccgctgttcgatttgaagtccacgttgtaaggcgggtctgtgaccaccagattagcctgtttgccatccatcaaggtttcgacgtcgcttgggttcgtggcatccgcgcacattaggcgatgcctaccaatcctccagatatcgcctttttcgacaaaggctgccgcttctagggcggcgttcaggtcgaagttatcgtcctcgatactgtcgccgtcaagagaacctattaactgttgtatttcggattcgtcgaaaccggtgagttcaacctcgaaatcggaagcatccaggtcggctataagtagggcgagtttggaatcatcccaatcgccactgatcttgtttagagcaacgttgagcgatttttcgcgggtttcgtctagctcgacgaccacgcagtccacggttttatagcccagatcagccagtactttcagacgctgatgcccacccacaatatttccggtggttttgttccagatgactggctccacatacccaaactcgctcagggagcgccttaacttttcgtagtccgcgtccccaggttgtaggtctttgcgggggttgtagtcagctggggtgagatcacttatagctatttgcttgatgcgcatggtttttcaccgccttgacaatttcgcggctagtagtccaggtgtcttcccacttgcgtgtgtaatccccgaaatgcccatacgtcgaatagcgcacatagccgggtgctcgcagcccaaactggtcgatgattgctgctggccgaagattgaacacatctcgagccgcagccgtgattatttcgtcggtgtattggccggtgccgagcgtgtcaacactgaaagcaaccgggtcggctttaccaatcgcgtaactaatcgccacctggcaccgggatgcaagatccgcatccaccacggttttcgcgatcagccgcgccatataagcacccgagcggtcaaccttagaaggatctttaccacagaaagctccaccaccatgagaagctagcccgccataggtatcaaccataagttttcgaccagtgagtccagtgtcagctttagggccgccctccacgaaccgcccagaaggattcaccaaaatagtcgtgttctcatcgacaggaagatacgaagagcaagctggaccgataatcagcgaagttatttcacggcgcaacacctcgaaatccttggatttatcgtgctggacggaaaccaccaccgtctctacggcttgcggttttcctgcgtcgtcgtagcgcaccgaaacttgtgctttaccatccgaaaggatcccagtgatggttccttgcttgcgcgcatcatctagccgcttacaaatctcgtgggctaaaacaagaggcaatggtaaacgctcaggagtatcagtgcaggcataaccgtagaccgtgccttgatcaccagcaccctgaagacaataagcagactcatcaccatggcgagcctctaaagatgtggtcaccccgccgttaatatcactagattgacgcctcacccacacatacaccaaaaatctccacggcttatagccagccgcagtcagtgcagttcgtacgcaatcacgcaagtccacacgagcattagtgctgatttcaccagtaacaataatccgccgcccagtagccatgacctctaccgcgacgcgggcgttgcgatcagtgtagagaatctcgtagagaatctgatcagcaattaaatcgcacagtttatcggggtgaccgatacacactgcttaagcactgcgaaccatagtcataggaatgccctttcagtagaaaaatcaaaagaaataaaaactccccaccatgtcagccaggagtggggagcgaagataaagaggcgaacccgagtcaggtgttacactggaatacgtgcaagacgaaacgagtaaacctaatccgccagagccttccggcggcgatggtagggccgtggtttacgggatgattgctgggatgatggccggcattatctttgggttcattatgaataatattgccttaggggtaggtattggcaccggagttggaatcgcgctaggggcaggctttagcgaaacaaaaggctccaaatagccccgggaaacaagtaggacgcatctacgagcgtgctttcaacaactgctccataacctcatcacccggagccgcacccgaatagtcactagtgcagttagcccgcacaatctcaaaaatctcataccaatacacgtttgcctgtttaccaaaagactgggacatcgcaacgaacggggaagcgatagcagccccagtggtcgggtgcttgccgagcaaaccgaacttggaaatcgcctgctcacactgcacatagcgggcgaacgcctgggcgtaggcctcaatcagacgcttagaaacaaacctcgtgcaaccacgctcatccaaccaccgccaggtttctttgtagacaaggtcagcacccaagggtttgccatcgcgctgaacctccgacagatactcagaaggctccggcatcacctcaccagcaagcaccgcgccatcaccaacatctgcgccctcaaaatcaaaaggggtcgctagcggatcttccaggcgagtagcaggcagacccttggcgagtttctcattgagcgggtcgggtttcgcgccagccctcacgcggcgcccaccgcgattggttccgtctttcgccacggctatcagcctcctatctgacctgcggtggccagaaaaaacggccttcaaatatgcgctaggttaataccctgtttgattcggtctttttgcgtacggttggccccgcccgctgaccttcgccaaggctgtagagattcgaggcccccaacccctaaccgaatcctcgactgctcccgtaacgtggcgtgggaacaagatcgatatttttagggtggggaagtgcttggtggttatgtcgcgtttttcaaaaaatctagtaggtgtagacctgaagggcttgcctccatctgtcaccgtctaacgcgctctgcctggagtggcagggtttgcacaggctgcgcaggttagaaaagtcgtggctgccaccatgctctaagggcaggacgtggtggacttcctgaactggggtggtcactcctttttccaggcagtcttcgcacaaaggatgttgcgcgatgtatgcggcgcgaatcttgcgccagcgcgcaccgtaacgcttgttgattctcgggtcacgttgaaacttacggtagttcttgtccgcctcctgggcgtggatctcgcagaatctttcgcgggtcagttcgggacagccaggcgcagagcaggggtgtttgggtttgcgtggcattcccgttatctcctgtggtgatggtaaagccccgagggaatgtatccgttcggggctttgacctttttctaactagttacactatatcgggtttgattcgggaatgtcgtccgggttttgtccaaccgggtttagcgtccgtagaggagactggtgaggtggtcgagggcggttttgcgccggttgtaggcggtggagcgctccacattcagccgctcttgcacctcataaatcgcatcagtggcggactcgtacccggaaaggaagcaaacctctagcacgtcacgctcctcatcggtgagcgcttgccaggcggggttgaaccagtccatgtaatccttggcttgcaggtacttcctcgtacggttatcgatccgttccaagtggttaaggattttgtcctcggccgcggtgggattaaacgcacggcggctgccatccaagacgggggaggacaggctgggcaggtctgcttcgatagctttcaggtcgtcgggagtgttatcgatgatggtttccatagtggcgtagtcacgcagcgcgttgatagcagcggcgcggcggtcaacgtagcgccaagtgatgtcggtttcttgatgcgtaacgctcatttggtttctcctttcaaggtctgcgctaccgcgtcgatgagcgccgactgggtcatgttcttcgattcgagtgccgataagatccgctgatctaccgaatctttggtcgcaatatgcgtaatagtcaccggcttggtctggccttgccgatacaggcgggcgttggtttgctggtagagctcaaggctccaggtgagggaataccagatgaggattgagctgccttgttggaggttgagcccatgcccagcgctggctgggtgaatcaacccgagtgggatttcaccgtcattccaagcctcaatatccgctgaagtttttaactgtctggcttgcgggaagcgctcacggatgcgtgctaggtcgtgctgccaccaatatgccacaagcacgggatttccattcgctgcttcgatgaggtcttcgagagcgtcgagtttgcggccgtgtaccacaatggggtcgccggcttcggtgtagatcgcgccggacgctagctgggtgagcttgccagccaggacggcagcattgcttgcgtcaatcacctcatcgcccagctcgactaccatctctgccgctagctggttgtagaccttgcgctccctgccgttcatggtcacctcggtggtcgtgacagtcagtggtgggagggtgaggtagtcgctggttcgcatagacagcgtgatatccgagattgctcggtagatttcgtcctcagcgctaggtttgggcttgtaggtgaacacctgcatcccactgcgcttatcgggcacgaaccatctagcgcggtagtgggaaatgtagcgtccgagccgctcacctaaatcgaggagtcggaactgggcccataaatccatcaacccattgctggccggagtgccggtcaggccaataatccgcttcacttgggggcggatcttcatcagcgcgacgtggcgtttggcgcggtggtttttgaaggaggagagttcgtcgatgatgaccatatcccactgccacttgatgccactatgggtaataagccagtcaacgttctcccggttcatcactgtgatgtctgcgcctgagttgagtgcttggcggcgttggcgttcggtgccgacagccaccgccaggcgtagctggcgtaagtggctccactttgcctgctcagcaggccacgtgtctctcgctacgcgcagcggtgcgataaccagcaccttgtgtatttcaaagctgtcgaagaggagatcttgtattgctgtcagggtgatgacggtcttgccaagacccatacccaatagcagtgctgcaaccgggtgttcctcaatgaaggtggtggctagggtctgataatcatgcggctgatattgcatggcacacctcctcaacctcatcagggttattgaggacgagtgcggtgaagcctaggtgcttcaactgcctgagcctgtgtttttggattgcgcgaactttaccgccgggtgccttgacttccacgaagccgacatgcccatcaggtaacagcacgattcggtcaggtacaccggcggttccggggctgactagtttccagcagaccccgcccaaagcctcaacggtttttacgagtgcttgttctaaatgttgttctttcatcacgtgttgctttctgctcacgtggtgacggtctatgacggtcgtctacataaccttttatagaaagaagtagtaaaaaattgcttcctatgtaaggactagtacacgactggcactgaccgtcacccgctcactgttagaggtcgaattcgctcttgagctgcaggccgtcaacgaagcgcccgctcttggtgcggcgacggttgaagcccatttgttcgagtgcggtgtagaaatcggaggtggatctggcgtactcgccaatcgagagcgcgaaagcccgatagtcggcatacaagtcaccagacttctgctcaaaagccgggtttatatcgcagcgctcatcgagaaagtgctgcagccaatcattcgatgacttatacgaatcaatcgcggcctgtactcgcggcggtggagtcaggtggtagtcctcggcgataatcttcttggccccgtccacaatccactgcaaaatcgcgccgccagcatcctgcaataggaactctgcatagttttttacgtcagagttgccttcgatttttgcctcgaatgggatcacaatcagccgcctccagatgcctgcgtccatggcaccaaccttgggtagatggttggtgtagagcacgagcgtgtgggttggctgataagcaaacggagccttgaacttcttttccgcatatatctcgtcagtggaagaaagctgcttcgcattcgaagtggacagcctcataccctcttccatctccgctgcaatcaggagccttttgcctttagcctcggctagttcgggtttgacgttcctgcggttagaaaccgtgagcacatcagcagaaatatgacccgcatacgagcccaacaccctggcgatcgtgttccaaaacgtgctcttaccgttacgtccatccccataagcgatgatgagggcttcgacgtagactttgccgatagcggtcagccccacgattcgttgcacatagtcgatcagctcgctatcgccttggaagaacacctcgagcgcagccaaccacgtgtccatgcctttggtggcggggtcggtggtggtttgtttggtgatgaaatccccatagtcgtgctcgtacatttgcccgctggtgaggtcaatggtgccaccaggggcgttgagagcgaaagggtctgcgtcaaggtccgcttgggtgacttgcaacatcggagctgcctccttcagtgacgctgtaatcgccttgctatccctgcgtttgagcacatatttctcataggcctgagcatcagtgagctgctcgtaagcggtccactgctcggtggtaaatagatttttcgctttggtcaggctcattgccgacagcaactgagtgaccccagtggaatcacacgcctcacgggctttctccaacaggtctgtggcttgctctaactggcgcgtggtgagttcttgggcgatggcgcgcgagccgggtctggtttcttcccaaaacgagccgttatacaccagccaatctgttgcctcagagaatgcgagtttttgtgcatattcgtctgccaggacggtggcttgaccgacatcggtgaagtcggtgggacgcagtccttggatttcggcgtagcgttcgggtggaatataacccggtgttgcagctacttttgcaccaaacttcaatgccgaggcccagattgcctccagctcggcatcgggcaagggtggcacgcaggtgtgtgctttcgtctcgaaaagctggcgtgcttgctcagtattgccaaaacgcacaatcactcgcccagcgaaagcgctcatggtcgcattgcgtgcgccttcccgaatctcaccagtagccatttcgagcgcggcgaacgcgtcagcatcaaggaaatcggtgatggatagggcaccgtctacccaggtgacctcagctgtcgggtttccgtaaataaatctggcggcatcgagagcgttgcggtcgaagattccggtgtaagaggcaagcttcttcttgattcccgtatagactccagagtcggtgactggcctgatagggaagtaggcgtggaagcgcggcctggcggtcttttcgcccttcggctttaaatgattacgcgaagtggcggtcgctagggcaacgcctgggaatacgagagccaaggattgtggtgtaacccaatcagccggagagttcgactggtcgttatcgatgtccatcaccacacacgcggagttcaagaacttgtcggtggaacggatatcgccctcatattcggccgccacatggtcacgtgccacagcgtttttcaaatcagccgcgctcgtgatgtgccggtgattcgggtatttgaggttgcgttgcgcgctcaccagattagtcgtgcacaaaatgaagtcagtcatgtagttctacctccgcgaagttgtggtcaaaataggtaatcgggagttcgagttggtgtgcccaggaaatttcggctttcatgcctggagagacgcgcggcgtatacacccacattgcttcgcacttggatagcagcacgcgacccatgaacatggcgaggtcgcgatcccacggatcggtatcatccataaactgcggaaacagcaggtgaggtgcaagtgggatacggcgacagcgcaccgcataagctgagaaattccttgccaactccacattcatctgcacgtccccggagtaaggtgagcagatataggtcaagggacggtggccgaattcggatatttccagagcccgcagcgccctatatgcagtcgggtctgcgtagcctttggagttacgccacggtgttagatcactgattagtggtcggtcatcttggagtgtgttcatttggtttcacctgcttgtcgttcgataaccggcaggatctggcagcggtttttcaacaggtcatagatgaacaggcggcctttctgcgtccaatacgtgtgcatcaccgtcttgccgctctccagcaggtgggttttggattgggtgtagccacatttcgcatactcggcatacagataccagatgcctgactgtttgaactggatatgttcatcagctaacagtcggttgagtttcttcgcactcagcccgtagtccttggcgatagcagtaatcggcatcaacgacggcgattgcaacacgatatcgtagtaggagagcttcggtgctgcctcgagtagcgcctgctcggcagcaagacgcttgacacgctcggcacgtagacgtgtgagggcttgttcgagcagatcatcgttgtcgagtagttcatcgatcgcgtacaggccgtggtggcggatcgatggcagcacctcatcaaacacccaggcttcgaagttctctgccgctggcaggtggctggagacaatcagccgataaacatcaccctcggtaatgaagcgggcttgctgggtgcgcccgaggctatcgacgatggggtggtattttgccaccccacggcagtgcagtttgatcgcatttaccgggtctttgtagccgagtgcgatggcgacgtctttaccagcaaacgtggtggtgccatccacggtgatggtgcgaatctgcccaaacacgggattggtaaaaaactgaaggtcagcagccattcctggctcctttcatggactcacagagagccaccttgtgtggatctcgctataagccacggcaggagcccaatccggacgggcgcgccacaattcgttttccggcaatggcgcaatacgcccacggcaagacccaaaaccggacggggttggagaaaaaacggactgtttcgaagcggtagtatttcgctattgctgatgacggtagggctctggtatatttacctgtggacgcatttcggtgctccacttccgaagcccgcgatttcgcgggctttcgtgttcgtagcgggaggtgacgtgtacgtcgggtatttcgatgagtttgggcataacggcgcatacgtgagtcgattcgacccgtcctataagactcacccagtattcggactcggcggtttcgtgatcccagcccagaacattcgcaagctatctggtattttccgtttcgttaaggagcgtgggctacgtgaagaaattgaggcgaaagtaatctcggcaggtaagcgcgtggagcattgggaaaagaaaggctcagcgctgctcaccacgaagaatatcgagaagtatcgggaaactcgccgcctcattttcagggttttagaaacgctgaaatcgttggatgctcgcgtggtgttttatgggcaggagaaactgcgcggtactccgattgaggcccctgagacgaatgctgagcgttacgaccatgcgatgaagcagctgattcaacgagtgaattgggatttgcctgatgctgagaatctgttgatggtgctcgataaacagggtgagaaggaacgactggagattttcgctggcgcagcagcgttcatgttcagcagtgaagatgccacgaaacttgtggagccgccgatggaggtggagagtcatctttatcaaacggttcaatgcgcggactggatatgtgcaatccttggccgcattgctgcatacaagtatgattcgaattttgctgaatataggtgggcactcaagtattttggcgaccggcttagcaagatcacgagcgaacactccaaaatccgcgccgcaagcagcgccacgaaagatctctacccgaaattcctcggcaactacgccacctgctactagatcgcgagccgtgcactcaatccttctgatagaagtcgcactcgtacccagtagcatcaatcggtaaaccctcagcccattcgggtagctcgttcatgagggcgcatatgtcagcaacggtgatgtcagaattgatgggttcgtcgatgacgacctcatcgtgaacatgcatcacaatccggtgcccggcactctcgatacgggtgatggcttctgcgaggaggtctctggcagttgcttggacgatgttttccactagcttgccgccgtaggtttcgagcttctgccacttccgagcaacaccttgaccccaatacgtgatcgcagtgccaccgaaccgatttaccccgataccaggtttcacgtatgccaagcgtctacccgaggatagagtaatgaacagcatcccggatttcttctcgaagacgaggttccgtagggtcacaggtctacccgtgctgattaccctggtcgcagcatcatcgacctctcgccacagctgcacaatgtgcgggtttgcttctcgccaagcatcgacgattagctgcagctcgtcttcagcaagtcccatcttcaaagcgcccatagctttgagcgcacccacggagccgttgtagccgcaggccaaaacggcgattttgcctttctgccgaagctcactattggctccgtgcttttccacaggtacaccaaacatcgccgaagcggtagcacaatacaagtcctcgccgtttttgaacgcggtgagcgtggtttcctcgtcagcgagccacgccaacacgcgcgcctcgattgcgctgtagtcggcaacgatgaaccgatgctcctcgctcgggatgaatgcggtgcggatgagttggctaagggtatcgggcacggagggatagagcatatccagcgcctcaccattaccagcacgcaccaaactacgtgcctgagcgagatccggcagataattcctcggcaggttttgcacttgcacgagacgtccagcccacctgccggtgcggttagccccataaaattgcaggagcccatgcgtgcgttggtcggtgcaggtagcatccatcatcttcctatatttcgccacagatgagcgcgataactcctggcgcagttcgagagcttctttcacctcgccactggcatatgccagggcatcatcgactgattctttagccatcgactctatcgggcagccatgctggtttaaccattcttgtagctgcaatggtgaggcaggattatccaagccagtgagttcttgcgcacgggcgagtgcttgcgcacggtgttcttcgtcaatcgttatagcgtttgcggccagtgtggtgtctatacggataccacggtcgttaatccgctgatccacctcatactgctcccagaggtaatcaggtactggaaagttggcgagcttttgacggatagccgtttctacctggacgtcgcgggcgttgtagctctgaaaaagtttccagccagccgggtcgctgctggggagccgccgctggctgttttcatccggtacgcagaagtgcttgatgagttctttaccttcatccatcttttgcgcgtcaagattcagcactttgccgacatctttaagagaaagtggcaggccaagggttgccgcccacaccatggagcatcgccacccagctggatcaagtcgtcgtccgaggtaggtgctgagacaggtgcgttcaaaagcagcgttgtacgcccacttggtgacggccgaatcatctaacgcatcaagaacggcatccgggagtggctctccagatgctagatccacggtgcgcaccgtgcaactgtcgatcgcgtaggagaaaaggagaatcttgaagtcagggtggttacagtatttgtagactccggctttggctaggttgattggtgagtaggtttcgatgtcgatacttaaggtgcgcataaggttccttaacgagtgagtggggcggagccaaccgacttgactccgccccttgagtggattggtttgctttaggcgaggaagtcttcgtctgcatcccaggtatcgaactcggatgccgcgctcacgtgcccgccgagtggctcaccatcacgggtcttttgaatattgccaagaccgcaggccacgccacggttcccgttggtgttgaaagcgtagaaattgatggaaactcgcccgtagcagccagaatagacttcggagcgatcaaggatggggtttacgtcttgatccacgatctgcggagcattaatactgttggcattcacgaaataatgtccggcataagcgtcatcgtcacgctcagtatctccatcacgtagcggcagcttcagtgatgcgcgtggcgggatcttccctccgaacttcccaataccctcggtgattgctgcctcgatagcagcattaattgcatcgatagttgcagcatcatctttaggaataagaagcgatactgagaacttcggtttgccgccgttaatggattttgcttcccacacgttcgcgtagctcaagcgtatttcgccggtaataaccttggtcggattattcttcttattcttggtgttcacgcggttcgacattttcgttaccttctttcttttcgttatttgtcgatgtttgtgaaatcatcagccgcagtactaacctgcagttctgggcgtttgtcagtgacgggaaccagagtgggtttaccctcgggcttgaccactagattcccgaggatttcggaaaagttcttctttcccatgagcttttccatcgcggtaatagtgagcagtgatcgtttatagatatcgcggtagcctgcagctttcgcagcctcagccaccgcagtctcatcggtgtatttgcggatcgagcggccagcaaccaacttgaacccctcgtagagctcaccgcttagggcttgactgagtgcatagtcctgcacgtctgacgcccaccgcgtgagttctggtatttgcgccaacacctcagccacctcatcagccgatagttcggcgggcggggtgaaatcgaatttagccagctcaaggttcgcttcagccctggctctacaggtggaggcgatgcggcagaactgacaccaggtaccagcacaaaactcgccttcacctttcgctgctagttcggcggcaggcttgagcgtctgctcggcccacttgttcagttcagtgacgctaatcgtccaggtggatacgtttgcgcgccgtggctgaaaaacagttaatgccacctgctcaatgtcgtaaagagcgtcgaataaggcaagtgcaccgagcgcgtagagcatcatttgcgggttccactcagcttctaccagcacgcccaagccatatttcaaatcgataacgtgcaaggtgccatcagccacgatgaggcagtcgccagtgccgaagccaccaggcacgacatagctgaagtcgaggcgctgttcgatataaattaccgcgccaggcgtcgcctgtttggcttgctcgtattgttcgagcacgtaggagacgtaatcatcggtgtgggcattcatctcgtcatcttcgtatttggagacggggcgtttagattgctgcttgagtgctcggcgcagcttatgttctgccagagcgtgagccgccgtaccttgaagggcggcttcacttggagcctctgtcaccccagccgtgagtttcgcggatgggggacagtgcaaccatcgatgcgccgacgaggcgctcaagagtgcgtgtttttgcggtggcatcaggcaccaccagcctcagcctcagctgcgacgagcaccgcgttggcctgctccaccgtcaactgcgagagcttagtgtgcccatgctcgcggatctgggatttgatgaagtcgctcaagcccgagcgtgcataattcgccaagactgcacgtacctgctcaattggcaacagctcaacgatcggctcgggctcgactgtggtctgttcttcgtcgggttcgtcttcgacgagttctgtatccagaatgtcctcatccgcataggggctttcgaggcgcgctgccgtgattgggcgctcgcccggcattccggcgtgatcttcgataccgtcccacgcggcctgctcgacaatcgcgctgaggcgagtcacatcctcagcaatcgagttcaacagcccaataatgctgttcgcagtactaatattcattcctgctcaccgccttggcgctcgtagcgctcggggtagagggcacgtgccagagccatcaaatcgtcatcgttatccacgaggctgaccgtttctggcacggggcggcgcatcgagtgtttctcaatggtggtgcgttcggtgcgtccagtgattcgccgcatcagtcggcgcaaccggctttcgtttcgcttatgtcgcatcgcaattactccttcacttgattcggttttgttgcttcgctctataagccacgccaaagctcgattccggacggtcggcctcgagaattcttcgtgcccgcttaatcgcacggttataggcatgacgaatagctgactcgtccttgttttcggctcgcgctatttcagcaaaggagtagccgtctaagacgactgcttcgattaggaagcgttggcgctcggacagtccagcgaatgccgtagcgacagcctgtttgttgatgaagtcgcgttcgatatcaatatcggcagcgaaatgcataccctccttgggaaactcggatggggaggagtgccgatctcggcgggtgtctgctcggtttgttttcttccaccgcgcatcatgctcaagcagcgcctgcgtaatcgggctatcggttgggagttggacttcgatgcgctcgtcagtgacgtaatcgaagctgaaagtgacgtgattttgattgttgtcggtcgtgctcatggcagcgccctttctttgtcagaaagagccgcatgagcgagctgccgttattcacttgtgtctgtaaaccgaagtcgtcttgagcgctgataaagaagcggcgggcaacccgttcggattgcccgccagcgtcagctcactcaattggctccctcggttttacagaggaatctgcctgtgtagcttgcaccggcatcagtggagccacacgccgatgtttgcaaccatcagcgatctagctgggcgaacctgccaccagctttgcgcaccaagcgagctgagctatttttagagccaatttcgatagaattaactctggaaatctctcgcacaacttaggcttcgattcgcttggcttctacgatagaaaacagacattcgccgatcggtatggtttaggacagggcaggacaggcaggacaaaactgatggggtgaggtgagcgatgagcctattcacagagctgatgaaagccgcttacccgcaccttagtgagggaatgaacgttgctccttacatgcggagcatgattagtcgactttgttctgtgcccgaagaactctggtacacctcacgagacaaaaccccagacgttgcccggtcggatagaaccctagagcagtactacaaacgcggagcatcgaagaagttagcgcgggaaatgctgaacaatccaacccgcagggagttcgttgattcgctcgattatattgagggcgtcccaactgaggccgcagatgaggtaaaagcagcacttgccgaatccatcgccccatttatcgacaaggaagtaagcgtcgataacgttggagacgtattcttcgatctgattcaggaatcgctgcgtttaactgtcgatccgtctcttgaagctggtcgtaagctgcagcgagccaaaacaggctcgatggcagctattaataaatacgggtcgcttctcctcgaagactgtaaatacgtgtgctcaaaacccggttgcggagaatctctacaaaatgttgctcctagtgggcaatcgcaggctgtatatgaagccgcacgtatcgccggagataaagccgaatacggaaacctcgtggctttgtgctccaagtgcttcaatcagtatgttctcggccataaaaaggccgaggaaaaagaactgaaaaagattaaagaaattcaagaacgaagcgccagagctaggcaaaccctcagcgctgtccagattgagcgtggcatcacgagggtagtagaaaacctggcacgcgcgaatccgaaagacttcgaaccacttaacttcgatcccgtagcggttaaaagcaaaatagacgaggcctccgactttttccttttcgatgaggtcatgcagcacgtgacaagattcttcagattcatccaaaaccaactaaaagaacaggcccgtattaaaactttcgatgaagaactcctgcgcgctcaaataaaagcttcctatcgaaagctcgcggacaagaagttcgacaagctcatcattcacagcgaactatcaaaacgcctgagccaaatcacgaaacaagaccaaagatactgcgcctacgtgatctcctatttcgttcaatcctgcgaggtgttcgatgctgctaccaagtaaactcttcgcctaccaagacagcgtgctaccactgctaccagaaatcctgcgccacctcgatacccccaaaacgcccaacgaaatcgctcaagatcttgccagcaccaatactgatccgactaggctcattgaagccctagattgcctgtatgcgcttggccggattgcgctcagcgaagaagggaaactataccgatgctaaaacaaatcagctgccgattattccgtgaagacggacaactacgcccacctatcaacttcactaaaggcctgaacaccatcctcggcgcgatcaaaggcgaagcaggctctatcggcaaatcaaccatgatgctcatcatcgacttcgcattcggcggcaacacgtatgttggtagtgatgctgtcaaagaactggacgaccacacgatttacttcacattcgaattcgctgacgggcagtaccacttcgctaggactcccaccgatccaaaacttgtcgcacaagtcgatgaaaaccaaaccgtcattggaacaatgaaaattgaagagttcaacgcgtggcttgctgcgaaataccacatggacctgccaggactgaaatacaggaatacgctcagccgcttcttccgaatctacggcaagaacaaccacaacgaactcaaacctctccaaacccgaggaggagacgaatcccaaaaggacgcaattaccgtcctaatcgcgctattcgggtactatgacgaaatcaaggacttcaaagaacaactgcaacaagccgaaaacaaaatctcagcgttcaaaatggcacgccgctatgaattcataccctcagctgtagatgggatgaccaaatacaagcagaacgtagtagaaatcgctgctctagaggaagaccgtagcaaactcgcccaatccgatgagactgatgtagaaccggcagaaatcgagaaagcgaacgaacgtaacgagctcaagcgccagctcaatgatctgcgccgcgagattacaagcaagaaagacgagctacacctgcttgacctgaatattcaccacggcgcatacccaaccgaagctgacctcaaaagtctgaaagaattctttccaggggcgaaccttgcaaagctcatggagattgaaaagttccatacgaaaatacaagcaatcctcggtgaagaacttgaagccgctcacacccacgttaccaggcaactcgctacgctcgaggggcaggccaccgagctactatctagcatagattccataccagcatcaaaagcattcacagacgagttcctggatgcctacacatccttagaccgccgtatcaataagctgcaagacgaaaacgatgcttttgatactcgtgacaggctccaaaaagaaaagcaagaagcgaacacacgctaccaacaacagctcgatgcggtgctctcgtctattgaaactgcaatcgacagccagatggaagccatcaatgaagaagtaaccggcggcgaatacaacgctccaaggctctcgcttagcgcgttcaacagctacgactttgaaaccccgagagataaaggcactggcactaaccatcgtggcgtcatcatttacgatctggcgatagcgcagaacacagcgcttccggccatcgcgcacgactcgatcatgttcgactccatgtcacgcaccgacctcagcaacctcatccgcgtatacaacgaccaggtagaaaagcagatcttcatagccgttgacaaagttagtgactgcactgacgaagccaaagctatcatcaagcgaaccatggtgctcaagctcgacaacaacgagcacgccctgttcggggagaagtggagccgaaaggaacgcccgtgaaaatcaaatacaacaaactccggaaaatccttttaggcaagaacatgaacagagtacagctccgtgaagcagcaggcgtacgagagaagcagatacttcgcaggcgtttttcaattacacgcccttggaactctggctaataccgggttaatacctaaaaatgggggtgcggattgttttttggacagttacagccagtaggtgcaggcttcgaggcaggtgccactgctggggtggatgtaaagaacctcggttacttattcttgacgaagctacctcggggctggaccagagaactgaggcaagtctatacgagtcgttaagtagattgggttgtgcctttgtgacaattacgcaccgcctcgagacacgtggagacggtgtgtttgatgacgcgagtgtagtcgcggaaagccttgtttatcaggggttttgcgtgatttaatttgaatgagatttggtggcgagggctgattggatgttcgggggaactggtcaacgggttttcggggcgaattgctcagagggttgagtagtcgattttgcttttgtcgtttttgagtgggtgagattgatatttcggctgctgagtgggtgagattgatgaaggctgatgaaaagatcgaatgcgaggaagaacaaatttgaattcataggaggtaacgatgaacaagattacttgtgtttgtttaggtgtcaaagatatggaaaggtcaatcaagttttatagagatggattaggatacaaaactgattgtagagaagataatccgccggtatgcttttttgatactccgggaactaagtttgaactgtttcctttggagcaattagcaaaagatattgatgaaaataatccaccaaaaggaagtggattttcaggaattaccttggcttacaatgttgaacataaagaagatgtagataccgtaattgaattagtaagaaaagcaggtggaaaaatcgtaaaagagccacaggaagttttctggggtggatatcacgcatatttttcagatttggatggatactattgggaagtatcatggggttcagattttcaatttgatgaaaatggattgctgaaattttaagagtgcgtgggaaaagattatggcatcttcaaaggactacctggacttcattttagaacagctcgctggtttggatgagatttctcatcgggcaatgatgggtgaatacattctctattgccaagggaaagtctttggcgggatttatgacgaccgctttttagttaagccaaccaaatcagccatagcaatgatgccggatgcaaagaaagagctgtcctatgaaggagcaaaagcaatgctcctcgtagaaaatgtagatgatcgagcgttcttgcaaaacttagttcaggcgatgatcacggaattaccggcggttaaaaaaagaaaacagctgatgggtggtagagagataaattgaaagttggaggtgaatacgcgtgaaacgaatcttctttgtcgaagatgatttgagtttaataaatggcctgtcttttgcaattaggaaacagggctatgaagttgatgttgctcggacaagtgtagaagcagcaaatctatggaagcaggacaggtatgacttagtcatattagatgtatctttgccggatggctctggttatgatctgtgtaaaagaatccgacagacttcaaggataccgattatttttttgactgcagcagatgaagaaaccgatattattatgggccttgatataggtgctgacgattatattacgaagcctttccaattgggcgtatttttatcaagaattaatgctctcctccgaagatgcgagaacttcactcaacttaatacagagttgaaatctaatggaataacggtgcatctattaaggcatgaagtttacaagggtgatattcctattgacttaacagcaggagaatacaaattgctatgcctatttatggaaaatcccaatatagcattatcgtcagagcagattttaagtagactctgggattctgaaggaaactacatcaacactagcaccctaacggtatacatccgaagattacgaactaaaattgaagacaatccagattgtccacaaaagatcatcactcttcgtcgtgtgggttataagtggaatgtgatagcataaggcgcacgatgagattattggcaaaccgaagaattaaaaatctctttatttatattctgttgattattgttggtttttcatcattttctattgctgctgtcattatgcagtgggagttcgcagtattacatatattgatctctacaattttaatgggatttttgattttaatttttctgtatttctattttagaaaacaggagaaaattatggaaaatgcagtgacacagatacgagagtatatttcgggtaaccacaatgccagaattagctgcgatgatgagggtgaactgtaccagctattccatgagataaatactttggctacaatcttaaattctcgcgcggaaaatgaggaaaaagcaaagatttctttaaaaaatactatatcaaatatttctcatcaactaaaaacacctcttgcagcgctgaacatatacaatggaattctaaaagaagaaacagtgaattccccgacaattaaaaaatttacagatctttctgaacaagagctctaccgtatagaaattctcgtcaaaaatcttttaacgattgcgaaattagatgctggaataattatttttgacaaaagtaaacactatattgatgacataatgaagcaaatccagcaacgttttgcatttcaagcacagcaacaaaataaaattttaaattttattgaacacgatactgctaccatcctgctttgtgatccatattggcttatggaggcaatcagtaatgttgttaaaaatgctttggatcatacaacagcaggaagtaccatcgaaatttcatggcgcaagtcattatcaatggtgcaaattatgataagagataacggaagtggcatacactcagaagatctcccccacatttttaagcgattttatcgtagccgcttttcaaaagatacacagggtgttggattaggacttcctcttacgaaagcgatcatagaagctcatagcggaacaatagaagtagatagtgacttaggcaaagaaacaatattcataatcaatttattgattcctacaaatttgtaggaaaaaagtcatttagctgtagggttcacgtaatactctttctatatgaaagcagaaaggggtgttaatacagtgagcttactagaagtgcaaaacctatcaaaaacctatggaaatggtgagactgctgttcatgcattaaaagatgctactttttccgttccaaaaggtgaatttgttgctgtggttggtgaatctggctctggcaaaagtactctactgaacctgattggcgcgttggatactccaacttcaggcaaagtgtttattgatggcaaggatatttttgccatgaaagaccgtaacttgactgtatttcgtcgtagaaatatcggctttatttttcaaagcttcaacttgattccagagttaacagtcgaacagaatatcattttcccagtgttgttagattatcaaaaacccgacaaaaattttctggaagatttgctttcgatattaaaactgtctgcgcggcgcgatcatcttcccaatcaactttctggtggacagcaacaacgtgttgctattggacgcgcgttaattacacgccctgctcttatactagcagacgagccaactggaaatctggatactcaaaacactagtgaagtcattgctttcttgaaagaagcatccagaaaatatgagcaaacaattatcatgattactcacagcaaaagcatatcccaggtcgcagaccgcattttacaggtatctgatggtgcattgacagattttgggaggtgccgtgaatgaaaagttatctcagtcttatcccgatctcagccaaagcgcaccacagacgaaatcgcatgacactattttgcattgctcttgcagtgtttatggtaactgctgtatttagcatggtcgaaatgggcttacgaatggaacaagaaagactgtctagtaagcatgggagtatctctgttctagatattcttaccagctcaatgggacaaactcttctttctgtcgcgactgttctgtttctgctaattttaattgcaggcgttttgatgatttccagcacaatgagtagtagcgtcgcacaaagaaccaagttttttggaatgatgcgctgtattggaatgagtaaacagcagattacacagtttgtccgtttggaagctttaagctggtgcaaaaaggctatacctatcggacttgccttaggggttgttgctacatggatactatgcgcagccttacactttatagtgagaggagagttctctcatattcctctttttggcatcagcgttttgggtattgccagcggtattattttaggcctaactactgtacttatcgctgcgcatgctccggcaaaatgcgctgcaaaagtatcgcctattacggcagtatcaggaaatgcaaatcatgagaaaacaacacgttgtgcatcatatataagatgtagaaaaattgaagcggctctcgggattaatcatgcaatcactaggaaaaagaatctgttcttgatgacaagctcttttgcacttagcatcatcttatttttaagtttctctgtcctagtcagttttgttaactacctgatacctcagtcagctgccacatcagatattgatatcgcaagcactgatggcaattctattcctaaagaactgctcgcatctattcgtagaatggatggggtcaaggaagtttacggtcgtcgcagtgcatttgatattcctgccaaagtgaacggcgatagtcactctctgagtacagttgatttgatttcttatgataattttgatctgcaatgtctgaaaaaagacagtgctttaaaaactgggagcgatctatcaaaagtatatggagacagcgactctgttttagcaacatctgaccagaacagcacatggaaaatcggcgatacggttcaaattggagagaaaactctcacaatagctggattgttaaagaatgatccatttagcgataacggattgacaaacggaaaactcacgttgattacctctgatgatacgtttgttcgtctaacaggaaatgaaaagtattctctcgtgttaatacagacaacagcagatgctacggataaggatattcagacaatccataattatgtaggtaaggcatacagctttcaggataagcgcaacgaacgcaccacgggaacctatgtagcttttgtcttttgtatctatgcgtttttggctgttattgcactagtaacagtgatgaatatcatcaatagtatttccatgagcgtatctgctcgcacaaaacagtatgggatgatgcgtgcagtaggaatggatggacagcaaatgacgaaaatgattatttttgaagcgctcacttatgcccttttagggtgcctatccggttgtgtttttggtttgccaattaacaaaatgctgtacgatttccttattattcagcattttccatctgcggtatggcaattcccaattctctctctaggcatcattcttttgtttgtctcactagcgacaattgcagctgtatattccccgacaaagcggattcgtgatatgtcagttactgaaacgattaatgaactatagctctatgattgtcacatagaaactttttataggaggcatattttgaaagtcgcttttttagatagagatggaacgttaaataaagattatcctgataatgaatggtttgataaaaggactcccgaaatcctaccaggcacagtggatggactaacttatttaaaagaaaaaggatatgaattaataattattaccaaccaattataggggaagggtatatttcatattcacattatgaagaatttaatgataagttaatagccgcattgaggaaagaaaatatagaaatattagatatatttcgctgcccacatagcaggaaaagtaaatgcaattgccataaaccctcaccgggtttgatcgttcaagctcttaataagtatcctgatattgatttggaaagctctatttatattggaaattctatatctgatttagctttagccaatgaatttaggttagaattttttaggttagaattctatggtataaattttaattgcaaaaatcaatttgatagtttatctcaaattagaaagtatattctgtgaagtagataagcaggtatttttaaaatgtactacacacagcaaattcaacatataggctggaactattatgagaatataaaagttcctgtatcataaaaactagggattaaagaattggattcgtcaagtccaaataccgagatcctcttcttctttatgcataaatttgcatggtgtgttcaatgcctacaatgatgccggatgcaaagaaagagctgtcttagaaggaacaaaagcgaagctcctcatagacaatatagttgaccgcgagttcttgcgagactcagttcaagcgatggtttcagaattacaggcgctaaaaaagaagcatactagtaagagtcgataatgcagtaattgacttgagtcggctatcttttaaatctgattgtttatgcattcatctccacccctgacttgaactgcaccttgattctcccctcctcgatggtaatgcgctcgatgaggcgaccaacgagggcttcgtcaaagccatcttttttggagctgcaataatcgcctacatttgtgccgagtggggttctggttttatctataccactttcggggcaagtcgtcgacctgcaaggtttatcgcatctaaacttttttggccactagcgttttcgctatcaacattctttgtaattctaatggcgattattcctctcgaaggcatcttagtatcacatgacacgccatacacgatcactctagctgatgctacagtttggaggcagatcctagtcgcgtgtttcaatttggctactagtgtgttgtttgcgggtggattggcgtttatctttcgccatgctgcttccgcgatcggatcatatattgcgataagcctgatagctcctattgtatttggtcttataccgctagacatttcaaagacaatcagttcttggctgcccaacaatgtttacggatacttgattacacaagatcctgtgatgacaggcacattgaactatccactcctattttgtgctgctatagcgtatcccgtgatttcggttttggttggatttgttagattcaaaaggaacgtagtctaagccggtggtagcgattaagagcttgcggcgtgttctccgcatgaaaagttctcacttgggtggttttaatccggttacaaattgcctggaaaatcagaacgacctgctactatgttccgcgaccgcagcagaaaccagcgctgccaaggaaaaaccgccctatacgacaaaacaagagaacacccattttggtacagagtgctgggcgggtacaaaagtcaatagcctgggtacacaaatttttatttcgagagaatattctaaagcagtgaactttagatttaccagattggttacacgtttttataccacaagttttccgctcttttcttggcattcttccactgtctcgttgagaaattaagatcaattacgcgacgtgcgatcagatccatagtctccctatttcttttctcagcatcgctgcggtggcaagcatctgagcttcccaccagcgttgcaaaagctcccactataaaagttagtattgtgatgatggcttcttttgacagctctcctaagaaggaaaagaatgctggaatactgtcgacggcgccttcagaaaaagcaacgaaaagacatacccccagtagaaccaagccgagaacaatcttcaaaattgaacttttaacccgtgatttacgagtcttggtaacaacattttttctgtgacaccattcgtacgctaggtcatcaatatcaaagaggtcatatatggatttgccaccaatattttgattgaaaatgtttccatcgccagagttatttatgttattgatggacattttatgacttcctccaaaatatatctgactgctaatatagcttatacaagcatctattcttgccccaagataaactgtcaacgagctttgggtttgatgaaataccagacaattggccaggtaatgtggattatcgccagtcacgaccgttggctgattgaccactggcacggtcatcgccttaatctaaatcctgtactcccgtcagcttcaccacgagaatgacaatccgtcacggaaagtgaatacaatgatgccgtctgcgtctactacggaagaatcaatgatccggcagaagaatgtggagcaacctttgcgcgggaggagtaactttttcgcggcacggctttcgcggggtaaagcccgctccaaaattcgtagacagataatccattagtgatgtgctccgatcatttgcgaccaaaccaatgcctcccggctcaggtccgtaatcggcattttggcttgttatcaggcggaaaagcctgcttgcaccgtcgccctcgagccgaacattttgtatcatcttcagcagctacataactaaaatgttggagccccaggtttatcctggggctccaacattttataagctgagggaatcgaacccgcgagggctggcgcggggaggttgcgaacgcgggttgagcattcgcccgcgccagtggttttaaagtgcgctgcgggtctggcacggtaaaagcactccggggaccccgtgaccggcttcgctggtcaagcccctctcgtatcttttaccggccgcgccccttgctcacaccgtgaagtcagattccacggcacccattcggataaaacctagcccccgcacctcggggtcgaagttcgtgaaagcatgtacaaaaccctaaaagccctagcaaaaccactaaaatcagcggctaatgcccattttgtgtatctttttccgggcgcgtcggtttttattagtgcgggtgaggaaacggtgcgcaacacgaagtgttgctggcacggcgaacccgaacggtgcgaaaaccgttcgggttttcggtattaacccgaaatgcgtgaggtatgtcagattattgacaccagggaaggaacatgctttaatcaagtattaaatcgaatgattgaatattctttggttagagtccaccaccgcacctcaaccactctttgctcggatgtggtgcgacccaaatttagaaagaaagtcgtggttatgagctttagcgtacgaaaaatattttctagtctcgttgtcagcgtagcaatgatctgttcactggccggctgcggtgctccgggagggagctcttctgcctctaaatcggatcaggcaacaacatccgcgtcccaaggcgtaactatcacggatgttacaggcaatactgttaaattgaagaaaccgcttgagaaggcggctattcaattgtcgggctcgggcggacctctcttgacgatggcggctctcgaccgagacaactacacttctaagattggcgcaatggacaaggggctggaatctaaccgccaagacctctggtcactcttactcaaggccaacccggagttagctgatatcccgaaaattggtgatgcaacaaaggatcagctcaccgccgagcaattgctggcggataatgtcgatggaatcatcgctcctgttacccaaaaagcaaagatggacgttatcgctgataaatcagggttgccagttatctacattgattatcatgggcaagacctgaaaaaccatatcaaatccacgaagatcatcgcggaggcaaccggcctaactaagaacgaaaaagcaatcacaaagttctattctgacatcgtcggggacatagaaaagcgtgctgcgaaacttaaaaaatctgaatcagtgtattttgaaactacgtcgagtgggccaaaggaatttggaaacacctatggctcaggaacgatgtggggtgcaatcctcgaggatgttggcgccgataacatcgcaaaacagtttctcgatgcaaaagatgcgcaaccgctttccgctgaacaagtgctggtaagtaacccagacaaaattatcttctcgggttccctgtgggcggatcagccggattcagtgaagatgggtttctccgtgtcgaaggaagaagcgcgggcatctatcgcccccttcctggaacgtgacggctgggacaaactaaaggcagtaaagaacaaagagatatatgcgatcggccatccgctgacccgtgacatgcttgacttttactcctacgcaagacttgccaaactgttccatccaaaggaattcgatgatctcgatccggatgcgttaatcaaggagtacttcgacaagttcatgcctattaagtaccaggggacatggtttatcaagtatgagtagtgcgaaagtgcggcatcttccgcgcgggctgtggatcgtacttgccgctttagcggtcatcgctctgtttgtggttgacctttgtgttggccctgcgaagatcacactctcgaatctggccgtggtgtttgaccctaatacagtcgagcatattgcattcttccgaatacgcatgcccgcagctctcatggcagtcggggtgggcttaagtcttgggttggccggcgcggtaatgcaaacaatattgaacaacccgctggcctctccatttactctcggtgtttcttccgcagcgagtttgggggcggcaattgtatttgtgatggcagtgccgatggtgttcgtcaccggtggcgcgctacttgtggcgctcctttcggtgttcgtgatcttcgcggtgggaaagtacattgcgatgagcaactcttcgctggtactcgctggtattgcgctgaattttctattcgacgcatttttgtcgttgattcaataccgtgcctcagaagaaagcctttcgtatattgtcttctggaccatgggtggcctcactcgcggctcgtatactcaaggctggataatgctttcagtgttcgtcatagtatttgccgtgctcttgcgcaatgcatggaatctcacagcgttgaagttcggtgaagcacgtgcggatgcgcttggggtgccagtccaacgagtaaaaattgtgtcgctgatatcggcatcagtgctcacagcactggcggtgagtttttgcgggaaaattggttttatcgggctggcggcgccgcacttggcacgaaggctcgtgtctgaggatcagcgattctatttgaccggttctgcgattcttggcgcaatgattctgcttttctcttcgattgtttccaagctgattgttcccggtgtggttgtgccaatcggcatcatcagttccattatcggcatcccattcttggtgtatgccctagttagccagcggcgtcaacgataggtgtagaacgtgattaatgtcagtgatttctcgtttaactatggcagtcgccgaatcatcgatggtattagtttccaggcgaaacctggtcaggtcaccgtatttatgggccgcaatggcgctgggaaaaccacgctgatgaaggcgattgtgcattcgagcagggagaagccgcgcccgggcacggcaaagtcgattgaggccgtcggtacgatgtcatatctcaaccagcataccgaggccgatttgccgttttcggtgttcgagaccgtgttgataggaaaggtagcgaaactcgggttgcggactgcgcaacaggatgttgacgatgttaacgagatcttagacatgcttgaactgcagcccctcaaaaacgttgccatcagaaacctgtccggcggtcaacgtcaaaaggtattcataggccaggcaatggtgaaaaaccctgatgtccttcttcttgacgaacctacgtcagcactcgatctagaaaatcagtaccgtattctgcagcagataaaatcactaaccgtggctcggcacatcacaactgtggttaccctgcaccagatcgacctcattgagcgttttgcggatcacattgtcgtcctccacgaaggcaagatttatgcggagggcgcgcccaacaaggtttttacgaagcaactcttcagggaagtttatacggtggacgcaatattggagtcagttaaagaccggattcttttcgggttcgacctcttggacgacccgcataagtaggccactcagcagcacacctccaagtgttgccagaattagcgttaactgagcaagttacatggccaaccctggccaaaaatcatcacctcgccaagtgtgtaacttcttcttctggataatctggcgctcaacaaggaagtgctcactagctagttttcaacatgtttgcctgcccgaaacgatggtgatccgttccgtatcgctttggaaccaatgcaccaccaggtgtttcctactcgacgaatacaagtaccgtccctagcgagactgcggcgattaggacactcaggattattccgaggatgagggcgcgccctccggattttataacgttgcgtaagtttacccccgcccccattgcgcccatcgctacggtgagcaacaaagtagctactgtgccccctaggatactgaaaacgttattgacagtggaaataccggcaaacactgaggccagcgcgactgcgaccagaaaccccacaacaaatccgggaatcagcggcgggcgcttgccagagctagctttttgtgcctgttcatggcgtacttgcaccacgcgccgctcgataatccccacaatcgccactacgaccgccaggcaggccacgcgcccaagcttggtggccgtggccaaatcagagatcgccgggtcgtaaatatttgctgccgccactacctggccgacctcatgaatggaagcacccagccagacggcagcttgggtgggggacaggtgcagtgcgtgggcggcagccggcaaagcaacgagggaaatcgtcccaaatagggtaacgcaagcgatagcggtggcgaccgcgtcatcggcgtcctcgcgactgcgggcagacaccactggggagataccggcaacggcagacgctccacaaatagccgtacccgaggtagtgagaatcccagtggcgtgactgacccgcataaagtaagtcagcaagtaacccgccaccatagttaccgcaaccgcgcagatgatagtcacaatcgcgccagtacctagcgcggcaatagccggtagcgatagtcgaaaaccaagcagcaccaccccggcgcgcagaatagtcttcgcggaaaaagcgattccgggttcgcagacagccggaattagcttagtgttacggactgctacccccagcaggatcgccaccagcatcgatgacagcagggggataaacaggttaatcagccaggcgataccggcgactacgcacgcgtaggctactcccggcaacaagcgtttaaagttattccaaaagtccacttgccaggtataccacatgttttaggcgatggagcttagtgaaccggcagagaaaacctcgatagaggcagatagttgataaccggcagtgaacaattcgaagaaaataactttcaactcgtctgtcagatatttggtggctatcactagaactatggaaccagctacctgctcccttgctgtttgtagtacccgcgcgaaagtccttcaataatctgctaataaatcaaggtgaattcctcgtttgccaaagctaagtacgaccttctcgacgcgctcaaaataagtgaggcaccagtcccagcatgcgttcaatatacgtagggtacgtcgtttatggctgtagctctgagagagccgggaacgattgctaattcaaggtaaggtgactgataagtaacaatttcaccaagaagggtatgcggtgagtgaagtaggcagccggcggcgggcagcggagcatttcgtgcaacagtggacaggtcgcggctacgaaaagggcgaaacccacagcttttggctctccctgctgcaagacgtgctggggatgcgcgaagtttccactaagtgccgttttgagcagcgcacccggactcgcggatttattgacgtggtgattccatcagcgcgcaccatcgtggaacaaaaatcttctggcgtaaacctagatgggggtgagctgcgtcaggggcagatagttaccccgtttgaacaggctaaacgttatgccgatgcgctgccgaatcggcaacgcccagactttattattgtttgtaacttcgagcatttccggattcatgacctcaataaagatgatccggccggcgattttattgaattttccttaacggaactgcctgaacagtcctatctgctggattttttgattgacccggcatattctcgcacggagaaggaacgccaagtttctatccgtgccggggaactgataggaaagctgcatcgcgggttgctggtgcaataccaagaccccgattctccctggtcgcagcactgtctgaatgtgctgtgtgtgcgcttggtgttctgtctttttgccgaggacgcggggctttttggtaaggacgcgttgctgcgttacctgcgaggttttaccgcctcccaaactcgggtggcgctgcaacgcctgtttaaagtgctagatactccacttgagcagcgggatccctatctggaggaagaactcgcggttttcccctatgtgaatgggggactgtttcgggactccgctgccggcgctcctcacttaaagggtgctggggaaagttcggatgaagaaggcggggagagcacatttccctcttcgtttgcggttgaaccgggacgaagtttagagattccgaacttcaccgcggagttacgcgacctgctgcttaacgaggtatcgcaaggaaccgactggtcacagatttctcctaccgttttcgggggcgtatttgagtcgactttgaatccggaaactcgccgcagcggagggatgcactacaccagcccagaaaatatccaccgggtaatcgatccgcttttccttgacggtttaaagaatcaactagaggggatcctgtctgatcccgggatttccgataggtcacggcgggcgaaactgcgggctttccaaaaccgtttggccagtttgacctggatggatagcgcctgcgggtccgggaacttcttaaccgaaacctatattgaggtgcgacgcctggaaaaccaggtgattgcggagctagagcgggggcaacaggcttgggagttcgagcaggagggcgccactaccaaccagataaaagtgaatctgggacagttctacgggattgagattaatgattttgcggtcgcggtggcgcgtaccgcgctgtggattgccgagctgcaggctaatggggaaacagccgcgattttgcagcgggaagtagcggatttaccgctgcacgatgactccaatattgtgctggcaaacgcggtccgcatggactgggagcagctgctacctgcggaaaagtgttcatatttaattagtaaccctccctttattggctattcgaaccacaccgcggagcaaaagcaggatcgggcagacctatttggtaagcgggggggggtgctggactatgtggcctgctggtaccagaaagccgccaattatatgcaaggcaccgagattcgggccgccttcgtatctaccaacagtatttgccaaggacagcaggttaccccgctatggcgaccgctatttgagcaagggattcgcattaacttcgcccatcgcagtttcgtctgggacaacgaagccgagaatcaagcccatgtacacgtggtgattatcgggttttcttatcaggatgacgaaccgaaatatctttttgagcaccctaaagagggagaatcccgccgtcagcaggtaggacatattaacggctatctgacagacgccccggatgtgtttgtggacaaacagatgaaaccgctttctgatgtgccaggaatggcgcagggattcaaacctgctgacggccaaaatctattgctttctgcccagcaacgcgacgagctactagctaaagagccggcagccgaaaagtgggttcgtcccttttctatgggagcagaatttattaaaggcatcgaccgttattgcctgtggttaccgcagattaccggagcggaactgaaaaaagtgccggaagtgcgcaaacatattgaggcttgccgcgcctggcgtgaacagcaaatcccgacgggtgatgcctataagttggctgatcgtccccacctgttgcgtccctgtggaaaattccgagacggaacctatctcgggttcccaaaggtgtcctcagagcgtagacactatataccgattggctttgtgactgatgggatgattccgggagacatgctgtacttcgttcccaccgctgatatttaccatttcggtatcctctcttcccagttccataacgcctggatgcgggcagtcgcaggccgtttagagatgcggtatcgctatacgaatactctggtttataacacttttatttggccagaccctacgccgcagcaaaaacgagcaattgaggaggccgccgccctcgtcctcgaaaagcggaaagtctatgccccagctaccttggcggagctgtatgacccggacaatgatttcctctatccggagttaacccgggcgcacgcccagctagatcgggcagtagaagctgcctacggggtgaactttgccggtgacgaaagcaaaatcaccgcccacctgttcaccctctaccaagccgccaccacttcctgaccgcggtaaaaacctcaagcccgcaggggagtcgctaactgccactaaccctggtacgcagtagagacacctgccgctcgcgacttatatgtaaagcagttttacatatcgggaaaacgaataggttgacgtgaagtcccttataaccataagacatgtgtttggaatggttatttccaccagtatcgcctagttctctgggtaggaactctattttgcgcaagtgttgcgatatgcgatacatacgcagtatattggttgcgtgggtgaaagaagggggatggtcgctgtgaaatccgcaagcgtgaatgttcgtattcaggaaaacgtgaaggctaaggccgaagaaatcttggatactatgggggtttctcgcgcgaccgcgattgatatgttttatcggcaaatcatcatgcacaatgggattccttttccccttactatccctagtgagctcccatctcgtgatgctctggacgagaaaaagtttaacgccctgatgagcgcggggtactcccaagctctatcaggtgactcctacggtattgacgaagtattcgacgatttgggcaaaaatctgtgatggatcagtatgcaatccgctttaccgcacaggcgcgacaacacctgaggctcattagggactatattgctgtagacctgcgagagcctgaaatcgcgaaaaaactattggaactgttgcaaaaagaaatatccacgctgtcatttatgccctatcgggtgaaactaatcgaagagaagccttggcgtgatatgggtttccgcaaaattcgggtgaaaaattattacatttacttttgggtcaatgatgatactaaggaagtcaatatcattgccgtaatttatgtcagacgcgaccaagcccagcaattggaatcgcatatttggtgaagctcgtgagcttgtctatctgcgccaactctaacaagacgctagttcgctcaaatatgtaaagcagttttacatatcaagggaacgtgtaaaaaaatcggcgaattttttacacgttcccgattttacccagcctgcgggcaaggttttgcaagcttttatcggcttggcgatactttaagggaagatacctagatgcttgagaggttaccgatgctcacttgtcccgaacctgcggaaaatcccgtgctttggccttggggagccaagcgggaggatgatggacagctatcttttgccggacaaaaagtaactgagctggctcagggtttcggcaccccctcctacctgtttgacttggatgattttgctgcccgcgcccaaactattgcctcggcgatggccgaagagttttgggaaggttacggattttccggtgccagcgtctactacgcggggaaggctttcctgtgcaccgctttaggtgatgccatcaccagggcggggatgggaatcgacaccgccagcctgggagaacttacggtggcgcttgatccggcgatgggggctgaacctaagaaaatcgggctgcacgggaacaataaatcccttgaatgcttgcggctggcactacgaagcggcatcggacggatcatcgtagattccctacctgaaatcgaccttttgcagtctctgagcgagagcgaaaacatgactgctccggtgatggtgcgggtgaccaccggtgtccacgctggggggcacagttttatcgccaccgcccacgaagaccaaaaatttggcctctccctggcatctggagctgccctccaggcggtaaagaaaattattgccgccccaaatctgcgcctggtggggctgcattcccatatcggctcccaaatcaaagatttagaatccttccaggtggcagcggaaagactgctggcattccgcgcccaggtgcaaaaactaggtgaggccgtccccgaagttgacctgggtgggggcttagctatctcctatcagggggaggaagtgcctaccgccagtgaatatgcgcgctctctggcggcctcggtaaagagagcctgccagcaggcgggcaccgatattcctcatatttcgattgaacccggacgttggttggccggtccggtatgcgtcagtctgtaccaggtggggacggttaaagacgtgcagctagaggacggcagcatccgcaaatacgtgagcgtagatggcggcatgagcgacaatattcgccccgccctctatgacgccggatatgtggccactttggcctcacgggtgtcggatgcgcctgcggtcagctgccgggtagtgggaatgcattgcgaatccggggatattttagtgcctgagattgccctgcctgctgatatttgtgctggtgatttactggtgattccggctactggagcctacgggagggcgatggcctcgaactacaatctggtgcctcgccccggggtggtggggcttagctgtaaaacacccccgcgctacatcattgcgcgagaaaccgttgctgacctgctgcgacttgatactggagcgcgcggtctatctcagtgaaaaatctcgaacgcgcccagccacaaataaccgctagagtagaaagccccggcaggaaaatacgccctgctggatgcgacgaaaagggtgagaaatgaagcaagcggtgaaaatagcagtcctcgggtgcggaaccgtgggcgcccaggtagtgcgcctactgcaagagcgcgctgccgattatcaggctaggtgtggagccaacctggagattatcggtatttgtgtaaataatttggctgccccgcgccccgattttattagccgcgatctgctcaccgaccaggcggaacccttgattgaccaagcggacctggtgattgaactaatcgggggaatcgagccggcacgcacctacattacccgcgccctcgaagccggaaaatccgtggtcaccggcaataaagcgctgctggcgcaacacggcccggaactttttgatctctctcgcgagcgggaagccgacctttactatgaggccgcagtagcgggcgccatcccggtagtctatggtctgcgggaatctctggcgggggatcgcgtcgaggtggtgcaaggaatcgttaatggcaccaccaactacatgcttgaccagatggaaaagaaaggatggtcatttgaccaggcgctttctaccgcacaagaactgggctatgccgaagctgacccgactgccgatattgatgggctagatgccgccgccaaatgcgccctgcttgcgcagttggctttccatactcgggtttccctagatcaagtagcggtgaagggaattcgccatatcaccgctgacgatattcaagatgcgaaggaatccgggcacactattaaactgctggccattgcgcagttggcgcaagatgaacaaggacgcgaatgtgtatcttgccgggtagagccggtattggtgaaaccagaaaatccgctggcaaacatcgcgggagcctttaacgcgattgtgattgatgctgaggccgcgggcagactaatgttctacggtcaaggcgccggcggggtacagaccgcctcggcagtgctttcggacgtggtcgccgccgcgttccacctggtatctgggggtgccgcaccccgcgaatcttcctatgccgacttgccgcaaatgccggccggacaagtgcgttctaagtacagcatccgcctagaggtagaggacgcaaccggggtattagccgaggtagcggggatttttgcccggcgcggaatctcgatagagcaggtgcgtcaaagcaatgacagcgaatccggtaaagcggtagtttccctatcgactgcctgggcgcgggcggacgccatagacttaacagtaaaagatttggaagccgcacagccggtgagccgggtaatccaagtaatcagtatggagggctaaaaaatggcgcatctttggcagggaataatcaacgaataccgtgattggctcccggtaaaggacgaagaagaaatcgtcaccttacaggaaggtggcactccgctggtttattcggatgatctgtctaatgaagtaggggcgaaagtctatatcaaagtcgagggtgtgaaccccaccggctcttttaaagatcgcgggatgaccatggccatcaccaaagtggtctctagcgggcaaaaaatggtggcctgtgcctctaccggaaacacttctgcttcggcggccgcctattcggcgaaagccggcttggaatgcgcggtgatcctacctgcggggaaaatcgctgccggtaaacttgcccaggcgattgtgcatggcgcgcggttagtggcagtagacggaaactttgaccagtgcctaaccattacccgccagctcaccgaaagctatccggtagccctggttaattcgattaatccctaccgcctgcagggccaaaagaccgcggccttcgaaatcgttgacttcctgggggatgcccctgatattcacgtactaccagtaggaaacgccggaaacatctcggcctattggatggggtacaacgaatacgctggtcggcgcaccgcggcctctttagaaaaagaaactaaactcgggcaggcacgcgctagtaaagtaccgcaaatgtggggtatccaggccaaaggggcagctcccttcgtagccggacacccgattgacaacccggaaacggtagccaccgccatccggattggtaaccccgcctcctgggattatgcatcggcggcgcgggatgattctcacggtttcatcaccgcagtcacagacgaagctattttggcggcacaggcgcggctcgcggccagtaccgggatcttcgtagagcccgcctcggcggcctcgatagccggacttttacaagctgccagccaggggaaagtgcctgaggacgcgactattgtttgtaccgttaccggcaatggtctaaaggacactgccaccgcgctgggggagcgggatatcaatccgcaggtaatcgcgcccaccctcgaggctgccctgcatgccctcgacctgaaatagcgggaactaaaatagcgatatgcgaatcgtaaaggatgaagcggaagtcaaagttcccgccacctcggctaatttaggtcccggatacgactgtatggggctggcggtttccctctatgatcgagttggttttcgggcgactgtggggaaaacccaggttcatgtgcgcgggcaaggcaaagatcagttgccagaggacgaaaatcacctggtagtgcgagcaatccgcctggggctagacgcggtaggagcattccaagtgggggtatccctttggcaagaaaaccagattccccaatcgcgaggcctggggtcttctgcctccgcgatcgttagcggtttggctatcgtgcgggcgattatttccgatcccgaggttttggacgccgatactatgctgcgaatcgcgacctacctggaaggacaccccgataacctggcgccggcaatttacgggggaatcaccctagcgggcatccatcgcacttccagtgaagaggctgccactaccaaagaactcacctcgccctttttagaaatgggggaagatgacgaagctgcgcaggataccagctctgaccagcccgtcctcagcggggattttcccaagacctgggcagtgaaaatcgagaatcaatacggattgcgccccacggtgtttatccccgacttcgagttggatacttcccaggcacgcgccctgctgcctgaacaggtaccccacgcagatgctgccgcgaatgtggctaatggagcgcttttggtgcgcgctctacaagatcatcctgagctattgatggcggcaaccaccgattatttgcatcaaaactatcgccgtgccggcatgcccgcctccttggatctaatgtattggttacgcgcccagcagctaccagcagttatatccggagcgggaccgtgcgtgctagtgctagcaaacgtcgatgaccaggtgaaatcacgagcggaaaaagtgggttggaaggtgcgcaccttggaattagacactcgcggggtgcgggaactctaaggagctattgccaccttgacctttattgttagctcgacgccagatatgccgatggcgccagcagcatggtcaggttcactaagcgcaagttaccgactggccgcaaatcctggtaagctaaattcacgaaggcaaaagcacctggcggcttgaacgttaggaacgctcagttccagccttcaaaatcgagacctatttctctcggttcttaatatccaggcgcgtctgcgtcatacctacattcagaaggaaagtttgtgagcacaaacgagaacgctaatgatcttcgcactatgaagctggatgagctaaaagccctagcagcaaaaatgcagttgcgagggatttcccggctgcgcaagaacgagctaatcgaaaaaatatccgaggctcgccaatcctccggcactgttgctgaggatactcagaaggctgccgtcacgaaagatgacttacctaagcggactgcggatgcgcgaggacgcaaaggacgccgtcacggtgcggtgcgccaagattccggcagcaaagaagaagcgaaggaacagctaaagcaagacttggcgcagcgcgccaacaagaataataagcaaaataaagctggtaaaagcaaggcggaggctccgcattccgttgatgagatcgctctccccagcgcagaagatgaggaacgcggggaaggtcgcggacgcggacggcgtaatcggcgccgcgaccgtaatcggcgccgcgacgacaattggaatgacaatcgcggagagcgcggacgcggcaaattcgataacgacgaagactccagcgaggacaacgaggaagaactcctgccgattgcaggggttctggacgtgcaaagcaatcatgctttcgtgcgcacctcgggatatattgccggtcccaatgacgtttatgtgaccctcggccaggtgcgccgttggggattgcgttccggggacgcggtacagggagcggtgcgtcctcccaaagagggagaaaataatcgccggcaaaaatacaatgccctggtgcgtttagacaccgtaaacggcatgagtgtcgaggaggcgcgggcacgcacccagttcaaagatttggtcccgctgtatccgaatgaacagttgcgcttggagaacactcccaagaacattactcaacggataatcgacttgattgcccctataggtaagggtcagcgcgggttgattgtttctccgcctaaagccggtaaaaccattattttgcagcagattgccaatgcgatcactacgaataatccggaatgtcacctgatggtggtactggtagatgaacggcccgaagaggtcaccgatatgcagcgcacggtgaagggggaagttattgcttctaccttcgaccggccagcttcagaccatgcttcggtagcagaactagcgattgaacgagcaaaacgcctggtagagctaggtcaagacgtggtggtactgctggattcgattactcgcttagggcgtgcctataacttggcggccccggcttcgggacgaatcctctccggtggtgtggatgcttcggcgctttatcctcccaagaagttcttcggggcggcccgcaacgttgaaaacggtggttcgctaactattctggctactgccttggtggaaactaactccaagatggatgaagttatttttgaagagttcaagggcaccggcaatatggagctgcgcctatcgcggcagctggctgacaagcgtctgttcccggccgtagatgtgaacgcttcgggtactcgccgggaagaactgctgctaaacaaagaagagttgcaggtcacctggaagttgcggcggatgcttagcgccttggattctcagcaggctaccgagtttgtgctttcgaaactgaagaatactaactctaacgccgaattcttgatgatgatcgccaagatgagcacccaagtttagctgctagcagacttagtgtttagataaatagataaaacatcaggcgccccgccgattctcggcggggcgctctattttgtctgcccaaactgtggtaacggctacgaatataacgatttggtagcgaaaaggttgcgtattggtctaaactgatttctgcctggttaaaacaggcaggttattgtgtcgactgaatgggataatcgtgggacgtcattgccaaaagaagaaaccattccgccatttgctctggcaggccggattagccaccgcagtgatcgcgggggcagtcggcacctcaggggcggtagctctgcatacttcctcgctgcctgccggtcagccggtaccggaagttaccgcgcaaactatttccgccaccaacccagttgcccaagcggacggtgatttggggcttcaggtaattaatgcgaaagtgcttactggcgcggaagctgatcctgccggtggcgccgcctcacccggacagtattctttagctgcgctgcgcagtgccggggttattaactggggtggatacaagttcacctactattcccaacaggttttacctggtggcggtctcaatattccgggacgtcacgtaaatgggggcggctttgtagccgatggggacggatatatcgtgctggcaaacgatgcccccaaaggtacggttatcaaaactccgtttggcgctcccggcaaagtctatgaccggggtaccacaggtaaccatttcgacgtttacacttcctaagcctccgccttatggccaggcgcatcctcgagaatgattttgccctgttaagcaggcgaagtgaactagctagcgctctcatctaggatataaacgatgagtttgcaagccgttgtagaagaaattgccagtgaaccggcagctaaagagttcttttctcaccccgccagtgcccaatcactgtattgccccgtggggctacgaccggcgctaatcgctgcagcagcgcaaaccaatgcgactaccgggaaattttctcctcttttctctcctatacagaagctcccggaagcctctcaaagtaaacagataacacctgcgcacggattaatcctgtatgtaaccgcgtcaggacgctccgcggaacaggtagaggcagaactggcaggttatctgccacgagttgcccgttttccctcttgggagactctgcctcatgaacgtctctcgccccgcgctgacactatgtcgcagcggatagccgccttgcgtcgcctgacccatcccgaaaaaagcggaccgggggaaacgatttctatattggttgctcctatcagggcgctattacagccggtagtagcaggtctagccgagattgaacccctaaaaatttccgagggtgaagattaccccctagataaactggcggcgcgcctgttggagttgggatacgagaaaaccgatttggtatctagccggggacagtttgcggtgcgaggaggaatcgtcgatgtctttgttcccggggaatcacatccccagcgtctagatttctttggcgacactctcgaggaagtaacttatttttccctctctgatcagcgcagcctagaaaaaagtccttccggggtatgggcgccggcatgtcgggaactgttactgaccgaccaggtgaagagtcgcgctagcgagctgcaatcctccttgccgggtgtggcagatatgttagaactgatcagccaggggatagcagtacaggggatggaatccttagctccggtattggcgccggggctgcaaagcgtggtttctctgctgccggaagataccaccatcgtgatggatgagccggggaagatagcgcgccgggcagcagacttgctagctacttcccatgagtttgagcaggccgcctggcaagcggccgctggcggaggaaaaattcctgtccgagcctcccgcgccctccaaagtctcaatgatttcaaccaagaggtgcgcgatagaggtttaggctggtgggagctaagcgggctgcctggcgcggatattttggccaccgaaagcgaggaatcggcgggggaggaactcgcggatctggggggagaagcggcagaaaatacgggggaactaactggcggtgaagaagacagagggttgagtgaaaccacccgtcctacctatgtttttagtggtcaaaagaccctagaagcgcgggcggctaaaggctatcgcggacatattgaccaggcagttaaagacttaaatcaatatctaaatgctggctggaaagtgattttgtcttgttctgggcgcggcctggccagccggtttgcgtccaatctttccgaggcaggcctgcctgccaaagcggtagcaaccctggctgcgtcctcggatatagaaaagggaagcgtactggtcacccccggtaaaatcaccggtggctttgccttgaaagcctcgcacctgctggtactggccgaggcggatctgacgggacggtctccgcgcctagcgcaagctccccgcaaattggctagtcggcgcgggaaatcgatagttgatcccctttctctaaaacccggggactatgtggtgcatagccagcatggggtggggcgtttcgtgcagatgaccaaacgcactatcggtaaaggtcaagacgcggttacccgcgaatacctggtgattgaatatgccccttcgcggcggggacaagccggtgaccggctctatgttcctaccgactctttggatttggtgtcccgctatgccgggtctgataccccgcagctcaataagatggggggagcggattgggcgaaaactaagaatcgcgcccgcaaagccacccgggaaatcgcggcggagttaatccgcctctacgcggcgcggcaggctactaaaggtcacgctttcggtcccgatactccctggcaaaaggaacttgaggacgcttttgagtaccaggaaacccccgaccagctcgccactatcgatgaggtcaaggcagatatggaaaagcctgcccctatggatcggctgcttagcggagacgtgggattcgggaaaaccgaagtagcggtgcgcgcggcgtttaaagctatccaagaaggttatcaagtcgcggtactggtcccgaccacgctgctagtaaaacaacattttgaaactttctcagaccgctttgcccccttcccggtgaaaatcgggcagctttcgcgcttttccactcccgcccaggcgcgggaagtcaaagaccagttgcgcggcggagaaattgatctggtgattggcacccatagcttgattaccggggaagtggggtttaagaacctggggctggtggtaatcgatgaagagcaacgttttggggtcgaacacaaggaaaccttgaaagctctgcgcaccaatgtggatgtactgtctatgtcggccaccccgattccgcgtaccttagaaatggcggtcaccgggattcgggaactatctaccctttcgactcccccggaagaacgccacccggtactaacctttgttggtctctaccaggataaacaggtaaaagcggcgattcgtcgcgaattgctacgtgatggacaggtcttctatgtccacaaccgggtggagtctatcgaccgggtggctgcccatctggcagaactggtgccagaagcccggatcgcagtggcacacgggaaaatgcatgaaaaacaactggaagaggtgatgattgatttctggaatcaccaggctgacgtgctagtttgcaccactatcgtggaaactgggctagatatttccaatgccaacactctgattgtttccggagcccatcggatgggtctctctcagctacaccaactgcgaggacgagtagggcgcgggcgggaacgcgcctacgcctacttcttctatccgggcgataaaccgctgacggaaaccgcgcaagaacgcctgcaaaccattgctacgaataccgatttaggggcaggtactgcggtggcgcaaaaagatctggagattcgcggcgcagggaatctcctgggcggtcagcagtcgggccatatcgccggggttggttttgacctctatatccggatggtgtccgaggccgtgcgcggctttaaagagggcgcggatcaggaagaagaagacagcgaggttcgaatcgaactgccgatcgatgcccatattccgcctgaatatatggattcggagcggttgcgcctagagatgtatcaaaagctctctagcgtgcgtaaagaaaaagagttggaggcggtgcgcgaagaaatgactgatcgctacggagtgcctccggcaaatgttgaactgctgtttacggtggcgaagctgcggatgcaagcgcgcgtcctgggaatcaaagaaattgtggcgcaagggcggttcgtgcgcttttccccgattagtttggcggattcacaaatgctgcggataaagcggttacatccggggacggtgattaaaccggcggtacgccaaatcttgctgcccgctcccaaaggggaaaaactgggtcaaggctcgctccatgatgaacctttagcgcagtgggtatcgcagttgctacaaaatgtgcttaccccctttgggaaagtaaaaacagatgcccaaaaatagagctggccgcgccctcttgataaactaaccctagctattagcttcagaaagacagtcttatgaataacaaagttcttcgcgttattggtatttgcgccggcactgccctgttaggggtggggcttgggggatgttcttcctctgaaaaggcgaaagatagtttccccgtggaacaggtggcttccgagttaaacgctgtcacccctactgacacgcagcaagcagccggtatgcagcagatgcggttagacgtgcaaaaacagctgggaaccggagtgtatccccaagctgtttgggagtcatttgaaaggggagaaatacctacccaatccctcgcctcgtgggcaccagcgatgaaggttgccaaggaagaactgcggggccagcccggatacaccgatgccgatattaataagtggctttctgaacaggtgaaacaaggggttttgcggaaagcagatttttctaaggacaccctagatttctggcggctgcaaaaattatctagcgatcagcaacaggggaagttaaacccagatttagcgaaacgaattcagccgaaactcctggctgctcaaaaagagggtgccaaacaggctgcgggattgaaaaccaacgccctattaactcaagtgttgtcggcgtcaaccgggacaccagtgctagaacctgacctgggtccgggagttaaactacaggggtttgccaaagcggagcaagtagtgcaaacccaaatgcagcaaggcgcacagcccgctaaataaaaattccgtatttcccgtacaagaacgggacttttgcaacctgccgactggctttgcttccagtagactgtagttaagtcatcaacaaatctataaggagcatgaccgtgtcactaatcatagctattaatgcccgtgagattctggattctcgcggaaaccccacagtggaagtagaagtccttttggattccggcgcttccagccgcgccgcggttccctccggtgcttctaccggtgcctttgaagcagtagaacgtcgggacggcgatgagcaccgctaccaaggcaaaggcgtacaggatgccgtacaggcagttattgacgatatcgccccggagctaatcggtgaggatgcttgcgagcagcgccgtattgacgacattatgatgcgtctggatggcaccccgaataagggcaaactgggcgccaacgcgattttgggtgtttccctagccgtcgctcatgcagcagcggaagattccgatatgccgttgttcaagtacctgggtgggccaaacgcccacgtactgccggttcctatgatgaacattttgaacggtggatcccacgcggactccaatgtggacattcaagagttcatgattgcccccattggtgccgaaactttcgccgaagcactgcggatgggtgccgaggtctaccacactttgaagagcgttattaaagatcgtggtctttcgaccggtctaggtgacgagggcggtttcgcccccaacctggactccaacgcagaagctttggatttgatttgcgaggctatcaagaaggccggatacgaaccgggtaaggatgtagctctggcactggatgtggcgtccaccgagttcttcgaggatggcaagtacaacttcgagggcgaggcgcgtgacaccgaatacatggtgaagtactacgacgagctggttgccaagtatccgattgtatccattgaagatcccctgtcggaggacgaatgggatgcctggaaggctctgactgcccatattggtgacaaagttcagctggtgggcgatgacctgttcgtgactaaccccgagcgtttggcgcgtggcattaaagagggtatcgctaactctctgttggtaaaggtaaaccagattggtagcctgaccgaaactctgcaggcggtagaggacgcgcaccgcgccggttacaccactatgacttcgcaccgcagcggtgagaccgaagatgtaactatcgctgaccttgcggtagccaccaactctggtcagatcaagactggcgctccggcgcgctccgagcgggtcgcgaagtacaaccagctgctccggattgaggatgagctcggtgaagccgccgtctatgctgggcgtagcgccttcccgcgctttaaggcctagtagctgacgcaaataataacttaataaaaaaatgggtgggggcgaaactaagtttcgcccccaccccttttatccgttcaaactattcgctgtcggcgtcagcttggctatcagataactcttggggctcctcattttcggaatactcggggaaatcctccttaaagcggtgatagagatctaggcgggaggaagcgggtctgccttgagccgcataggcgcgcctaatgcgctgtacataggtgttcaccgtgttggtggtgagccctagctggcgggcaaccgttttcgctggcagtccccgaaaaccgtagagttctaatactcgcagttcattagggctaagcagtaaacagttaggttggggggactctgaattttcatcggccttgttgctttgcccccggttcttttctccgtggggttgacagagcgcagtaagcaagtgtgctagcggctcacatttgaaaactgttttattgcagcaggggcgcttggtgactgcgggtaccaaggcggtttcctctgattgcaggtagggcagaaccgtaaaacctaaggcacatagcctgtctaggttgtccagaagttgggagtcgtcagctaaattaccggctaggatgaccgcaatcgaggagttttcatccgctttctcttccggaaaactctgtaaaaaaccatttatagtgttgaaacttcccaaaaaggtcatggcggtgtcctctaaaatcacctcgcgaatcccgaggccgattgcgggttgttcgtccaataccgctacagatttaagcatcttcctctcctgtcttaaaaattagacaccctttatataagggaggagttgaatatcagattagagaaaatcacgtctaatttccggtgaattcagacttaatacttagacaatgtacgggcaggtagaagcgatttaagtggtttatttacccttaggttcgcacacaaccgactctgaccgaaccttattgtaaacctagaaaaagcaggacttagtgcctatggaaaccgccttatatgaggaagggtaacgattagaataaaaataatcagattaaatcctcacgagtgtcacgatgttagaaatatattcctctcaagaattggcagctgttttaaatcaggcccgtcagacgaaagtgtcggcgggtgaaaagggctactctatccgtgacctcgctaaacgtcttgatctcgcacctagcaccctgcaggggtggctacagggtgcgcatctgcccaccctcgccctacgcgagaaattcttgcagctgctggacgagctgggattattaacccccgaggacaatgaatctttctggcagcgcactctagatacactttcccgctctaaacagggatggatcggctgtccctaccaggggttactgccttatagcgcacagactgaaagcgtattttacgggcgtgaacagctgctgggggaactggaaaacgcgatcaccaccgctcaaggcaaacgtacaaaactggtaatagtgctcggcgcttccggtgcgggaaaaacttctctgctttcagccggtttagtaggtaaatcctgtcaaccatctgggcggctcagccactaccaaccccggactctgtcggcgggagaagtgattaaacagcttccgcagctattagcgcctgccgataaaactcagtgggcaaaatccttgctgataatcgatcaacttgaagactttctgattgcaaacccggataaagttactaccgcgctggatgccctctatgaactggcagaaacccgggtagtagttttgggggtgcgttcagatgccctggatgcattattgcaggatgtacgcttttcccgagctctttccagtccgctgatcgtcacggctcccagcgtcgttgaatatggggaaattatttcccgtcccgccctggatgcggggcgaaagatcactcctgaacttaaagagctgctgctttctcaaatccaggaatctactgccgaggacgccagcgtacttccgcagctgtctaacttgctgttgatggtttggaagtccaccaataactcgcttttgaccgttagtgattacctgaaagtaggcggattggcgggtagcctggaaaaactagccgaccagttttaccaaaaactctcggcctctgagcgcgaaaaattacgttctctgctgctttcgctggtggaagtgggcgaacatcgggttacgcggcgagtaatagctcttagcgatgttcctgaagagtatctggaactactggaaagtctcagccgcgaacgcctggtggtaatcgatggaaataacactcagatcagccacgataccttgctttctagctggagaactttaaaagggtggattgaagaatcccggattgatttgggcttggttcgccagattcagattgccgcccagctgtgggcggaatcggggaactccgtagaggccttgcgcccctccctattttatgcgtgggaaaaccgcaaaataacgcggcaggtggctttcaccaagcaggaagaggagtttttagcagcatgtgcccgggaggccaaccgccaggaagaagaacaacaaaagcgaatcgcagatttgcgccatcggaatcgggtagtgaccttgattgcgacggtagcgggggtgctgctggtagcaacgattgccggtttctttcaggcatatcactatcaaaagcaggcaactgcctccaaaaaggatgcagaatcgcggcagatggcgttgatttcgcgggaagtgcgtaactcggacaccaacttggcggcgcagtttgccttggccgggttgaatatcgctaacacccgcgaggcacgttcagcgctgattgaaactacctcggttccgattcccgaacggatcctgggtgagggcggaacggtacgggtggccggcaccagtgatggcaaagtgattgcccgtgctgactctaaaggggtagtgagcctgtggcgaggaggcaacatcaaagaaaagccggaaaccttctcgcccagttccggtcagctttttaccctggcggtacgtaaaaatgccggtagaatccttttggcggtcgggggacaaaagaccgcttctctgtgggatgtgactgctaagccccgccggattggcgaatatggggcaaatgacgtggcctattcggtagctttaaccgatcggtatttggggtttgggttcctgaatgggaaggcgagtctgtgggagctggatcagatcgataaacctcgcgcggcctcctccttccagctagatacccccacggcggtgactgctttagctatttcccctgatcaaagccaggtagcttatggagggcagccggggaaactctatctttccgaccttagtggaaataataaaaagctacttgatttgggagaaggctctgcgttagatgtgaagttttctcccgatggtcaggagctaggggcggcgctgaccagcagggaggttcgtcgctggcaggcgcgtggcgacaatgctgcactctccagccttggcggcttcttttccttcgtaaacaccctggagtatgaccaggatcagatcattgtgggctgctcggataccaccactactatttgggatcgcgcgggacgcaaactgacttcgctgccgggtcgtgaaattatcactgccgccaccaaggtcggaaaccgaattattaccggaagtgtcgacgggcagctgcggcattggccgcaatctgtgcttcctttagttaatgaggacgggtatctgattgattcccacactgatcgcaagaactgggtgtttgtttcccggcgcctaaaaactcccgcgttgttgaagactgaaaaagatggtttgcaccggatgaaagacccggtgatgccggcgaaatttaagtctgccacgcgcaccgaaattgccgaagatggagagttcctggttaccgggacccaaagcggggagctaatcacctggccgctaggtcaaaagggtgcaggtagcccgattgtttccaagattggggacgagtttctgggggaaattcgcctctctagtgaccataaaaccgcggcggtagccaaggctgatgaactgggtgtttatctgctcaactgggatggcaagggctggaaacagtatggggaactaccggggcagcattacataatgcggattttagggaatcggggactgatggcgaccgccgctgaggatgcttcggtggcgatatataccttggatgcccaccctaaacgggtggggactataaaaactgaatctttggcttctgcgctgcactatgacgctaaacgaaaatatctatatgtgggagaaaccggcggcaggatcactattaatgatgtgaagaacccgaagaagccacgtctggttgcccagttgcggggattgcaagcctcggtcaatgaactggatgttactttgagcgacaaatacctgttcgggatttcgtcagataagaaactgtgggtgtggtctctggagccgctaaaccccaacccctatctatctgtgcaaatcgaccagattccttatgctatcgcggacacgccagcgggttacctgattggcggggataaaggagtggcaaccgtatatccgcattcgattttggaagcgcgcaaacaggtttgtaaaactatcggcgaaccaatcagaaagcaagagtgggatgcggtagcccccggggtgcagccggtttctgcttgcaagaataagtaactagttttccggcagtaaacagcgaatagcggctgccctcagaatgcctgactgccaatcactgatatcaatggaataatgaagccgtgaagtcgccgcaaccgccaaaaagtgtgcaaagagagaacacccggaagcaagggtctgctttccggtcggtatcgcctttggtgcgcagtgcgcggcgtaatcgaggacgctccccggtggccaaggcagctaaccggcgagtaaagctaggatcgcggttttcggtaaccgtaggtaccattctggtggtggcttccatctttttgctattagtaggggcgcccctatttgacctggtaagccagatagagcaacgcaataaggtacacgggcaactggttgcggcgcagcaggagaatcgagaactgcgtcgccaattagagctatggaatgattcggactatttaacccagcaggcacgggaacggctaggttacgtcaaacccggggaaacccggtatgcgctggttgatcccggcaaagattatcaggctcgccgggaggcccgcctagaaaaacttccggagcgcccctggtatttagaggttacccattcggtgaaaatggctggtcaacgcgggcaaggtaaagatgcgtccgcgcaaagccgcccaaaaccagcaccgggagccactgcgcaaagcgaagaggaaaacaaaaagtgagtttacaacctaaccaggttacagatgctgatcttcaaaccctgtctttacagctagggagggttccgcgaggagtggtgagagtagccgcgcgctgcgtatgtggcgctccagcggtagtaactaccgcgccgcgcctagaagacggatctccttttcccaccactttttatttaaccctcccttctttggtacgcgtcctctccggcctggaagcctccggtaaaatggttgattaccagcagttactatctgaagatgaggatttagcggcagggtatcggcgcgcacacttggagtatattgcagctcgccagcgcgtagggcagaaggtagggatgggcgaagttcccgaaattgcgggagtaagcgctggcggaatgccagagcgggttaaatgcctgcacgccctggtcgggcacgcgcttgcagccggtaaaggagttaatcccatcggtgatttggtattagccgacctagcggccagcggactatggaacagcgaacactgccaatgcgaataaggctgcactttcctggaacccttcccgtttagatatatacgcctcctattagttgccaatcctgattccgtggaaatataggggtatggcattagttgcaggtattgattgtggcaccaactccattcgtttaatcattgcgcgccgagaagccccggacgcgcccttagaggtactaacccggcagatgcggatagtgcgcctgggagaaggcatcgataaaacaggggaatttgcccccgctgccctggagcgctgctttgcggcggccgaagaatatgcgcagatcatcgcggaatatggggtggataaaatccgtttcgttgccacttcggctagccgggatgctaagaatcgcgaagactttttcaccggtattaaggaacgcctgggggtaaccccggaagtgatttcgggagaggaagaagccaccctatcttttaagggcgccacttcctcctttaaagacgaggatgaaccggtgttggtagtcgatatcggcggaggatctaccgagtttgttctcgggcagcgcgggagggtaatagacaccatttccaccaatatggggtcggtgcggatttttgagcgctacttggctccggtgattttggcggcaaaggaaggggatggctccctggatccccgccagacccccggcatcgctaaagccctgataaaagcctcttttgcgattgatggactgattgatgaggccgataagaaactggggttagatcgggcacgtaccttgattggagtggccggaacggtcactactattaccgctcacgccctcggtttagaggagtaccagcccgaaaaaattcacggttcgcggattacgcccgcgcaaatgctgcgttcttgtaactggatgatgaatcagccggtatccgtgcgcgctgccctgggctatatgcccaccgggcgggcagatgttatcggagcgggcgcgctagtgtggtcgcggattattgaacgtgtcaatggggaaatagaattggatggcagcggcttaaaagaaattttgacttccgaaaccgatattttagacggtattgccctctcgcttctgccctagctacgttttcctcctcgcctccctaatagaagacgagaagcatcctaaatccaggaactaaaccacatccgccaaccccagtgagaatagggaatcggcattccgctcacaaccggatagaagaaaatcgcgactagtaaaatcacaattaccagggcaatccccatcgaaaccgcgatatcgggagtgcgttgcggtgggggaaccagctgatctcggcgagctagcaacggctcagggagggggagcagcagccccagtaaaagcccgattagataggtaaccgctatggccaggaaaggggttaacaccaccatatagaacatgaaaatggtgcggtaccagtaaagcatccagggagcccagagccctaggtagccgagcaagattattcctgcacgccagtcacggcggataagagtacagtaaataatcactgccagggcgattacccccacccaccacagcatcgggttacccaacgaagacatggcttctaccgtgaaatctccgttatcaccatgcggtttttcaaaaagcatcgaggtgggacgctgattgatcagccattgccaagggtaagactgataaggatgtttactggttaccccggtatggaacttcattacctcactcatataggtgacgtaatcagaaattgggtccagccaggaggtatgcccggcggcggtggcggtttttccgtgaccccaggcgcgcgggtgggtaaaccagttccaccagttcagcaaatacaccccgaaggccaccaacaccagttgcgcaaatgccggcagtcctccccgcacaattgctcccagccaggcgcggccctggccttttaccccgggatattgcttgctgagggagcgcggagatatccgcagcgccgaaagcctcagggtcagatcccgcaagaacacaaaaatcccgcatactgctagcagataaagcccagaccatttcactgcgcaagcacaacctagccaaatcccggccgcgaccagccaccagcgcacccccgccaggtcattacccagctctgctcccagtagccggcgagccagcgtctggcgcacctgcagctggtcataaactatacaaagtacccccgccaggcaaaacgcagctaaaattccgtccagcagtcccactcgagaaagagaaatcgccacgccatcggtggcgataaacatgccggcaatcccagtcaggatccacgagttaaatagcgcccaggccaggcggcaagtcaggtagaccaagataatcccgcaaatcgcggtagcgatccgccaaccgaaggggtttgaccagccaaaaatcttcattcccaggccgatgatccatttacccaggggaggatgcactacgaatgcgggatccgcggaagctagcgcaaaatcacccaccgcgaacttagagtcggcactcttaggccagttagtttcgtaaccaaaacgccacagggaataggcatccttcacatagtaggtttcatcgaaaattagcttgcgggtagctcccagtcgtaccaggcgggcgatcgccgcaatcacgcagacgataacggtaactatccaggcgcggcggttttcgattgcctccctttcccgctgcccgcgccatccatgcaggtagagacgagatagcggggtaacggaggtccacagaggcgcgtgcggacgggggcgacggcgtgtagttttccgcctatcgcctttcgtcaaagtttgccgtgccgctgccggcgggggcggagcgggacgtccaggcattgcttgcatatactcgatattaaccggatagggcataattgtgagagtggaacagttttcctgggataccggcaccatcgctttagcagctaccccgattggtaatcttgctgatgctaccccccgcctagttagcgccttcgaacaggcagatttgattgcagctgaagatacccgccgcaccgggttgctgcgcgaacgcctcggggtaggtaggcgtgcccctttagtttcgtgtcacgaacataacgaggccgataaagccgaacaaatagtttcttgcgcggcggacggtcagcgagttctgctggtatctgacgcgggtatgcccacggtctctgacccggggtatgtgattgtgcaggcagcgattaaacgggggatcccgctgacagtcctgcccggcccctcggcgcccttgctcgccctcgccctctccggacttcctacagatcgtttctgctttgaaggattcttgccccgcaaacaagcggccctcatgcggcgtctagaggagctttccggcgaggagcgcaccatgattttcttggaatctccccgccgtctagcagccagcttgggggcactcgcccaggtttttgggccttctcgccctgctgcggtctgccgggaactcaccaagatgcacgaggaagtgtggcggggaaccctcggtgagcttaaagaaaaagctaaagacgtacgcggagaaatcgtgattgtagttgccggagcctcgccgcaggctcccctggaggaatcggaagcggtaaagctcgtcctcagccgggtggaaagcggggaaagactaaaggatgccgccaaagtggtggcagccaaaaatggacttagcgccaagacgctttataaccggatactcgctgagcgaaaataaccgggtctttaggtatattttgctcccggcagcggggcattaggataaaggtatgactcatgttctatctgctgttgcttggccctacgccaacggcccgcgccatattgggcacgtagccggttttggcgtcccctccgatgttttcagccgctatatgcggatggcaggctacgaggtgctgatggtttcgggaaccgatgagcacggcaccccgattttggtgcaggccgaagcagaggggatctctccccaagaactcgctgatcgcaataaccggctcatcgtcgaagatttggtgaacctgggactgtcctacgacctgttcacccggaccaccaccggcaatcacattgcggtcactaaagccatgtttgcgcaggtgcgcgagaacggatacctgattgaaaagcgggcaatggccgcgattagcccctctagcggccgggcgctacctgaccgctatatcgaaggtacctgtccgctgtgcggagccagcggcgcacgcggggatcaatgtgacaactgcggcaagcagctagaccccattgatttgattgacccggtttcgaagatcaatggcgaaacccctaaatttgaggaaacctctcactatttcctagatttgccggctcttgccgatgccttagccaagtggctagatgaacgtgaggcctctggaacttggcggcccaatgtgatccgtttttccaagaacattttggcggaaatcaaaccccgcgctatgacccgcgatattgactgggggattccggttcccgggtgggaagatcaaccaagcaaacgcctctacgtgtggttcgacgcagtagtgggatacctatctgccagtatcgaatgggcgcggcgtatcggccagccggaacgctggcgggaatggtggaatgatcctcaggctcgttcctactactttatgggcaaggacaatatcgttttccactcccaggtttggccggccgagttgcttggctataacggtgagggcgacaagggtggtgagcccggagacatggggcggctcaacctgcccaccgaagtggtttcttcggaattcctaaccatggaaggtaagaagttctctacctctaaatccgtggtgatttatgtacgggatatgctttcgcgctaccaggccgacgccttgcgctattttatttccgcagctggccccgaaaatcaagatgccgatttcacctgggcagagtttgtacgccgtactaatgatgaactggtagccgcctgggggaacctggtaaaccgggtggcctccatgattcataagcgggtcggttccattcctcagccagggcagttacaccccgaagaccaacagctattagaccaggtagaagtaggttttgctgaagttggggaactgattgaaactcatcggcaaaaggcggcgctgcagcaggttatgcacctggtgtcactcgctaatcaatatgtggctactaccgagcctttcaagttgaaaactccggaaacccaggagcgtctccacactattttgtgggtgttagcgcaggtaatcgcggatctgaatctaatgttttcgcctttcttaccgtcttcgtcgaatgcggttgaccgtgtgttcgggggagcgggggagattgcccctatgcctcgtattgaagaagttaccgatttagaccaaactagagaagatggttcagatttcacctatcccatcatcacgggtgattacacccaggttccgcggtggggaaggcacgaaattgaaatcggaagatcggtttctaaacctaaacccgtgtttattaagctagattctgagattatagaagaggaattagccaggctcgcatagagctgaggcataaaggagaaggtacgtggctgggttttggcaacgcttgaaaagactctttcgggggtcttcagctcgtgatgacgagcgcgactcccgcctgcctttagcattggaaagcgctgataaagaagcagacaaaaccgagggtgaacgtaaagtttacgaatcctccggggtggtgattttagaaggcggcgcggtcgaggactcgccaagcgaagaaaagcctgccgcttctcccgcgcctaatccgccggaagaaaaaacagcttcagaggtagaagaaaaggttaaagatagcgaagctagcaataaagagcagatgcagactgctccgccagcagtccaaagtcctgaatctgctcagcaagaacccgggaaagatgactccgcttccgaagatgaaagctctcaacctccagctgaaccggtggtggagcccgaccggaaacttccggtacacggggtgaaaactgctgatatttgtgcagctagtggcaatgagatctatgcttcacccgccattgaccgcaccccgggacgcaaactgattttagctttcgaaaaacgcactccccaggggcgttgccaagtgtggtacacccgcagcagcgaccacggcatcagctgggaagaaccgcgcgtcctctttgacccggaaacctacactgattctggcgaatgttttacctccccacagattattatttcccaggtgactggccgggtgttcatcgcagtcactacccgtaccgctggcgatgactccaagaatcggatcgcggtggctttcaccgatgatgagggcgactcttggggttaccgggatttgaccagcctagtagacggggaccagaactgggtgtcacggcgcaccgcccatggacacggggtgcagatgcgtcacggaatttggaccggtcggctggcctacgtggcggtagctaccgacaaagaaggccggcgcggcgcagtagcggtttgttccgacgaccagggtatctcctggtgggcaggtaaactcacaggtgaaagggtactgcaagccactatcaccgagctcaccaacggtgaactggttttgggctgcgttgaggaaaccgacgaggggctaacttttaacgcctatgcctccgctgacgggggacgcagtttcacccgatccttagaaaagaaagctttcgggaaagccttaccagtagcggtcgaacgcgctttttattccgcacctgagcatactgaacagtctcgggtgatgctggcggtggcacgcgatcaaaatgggcaaggaactgtgcgctccatgttcgatttcgcctctgagctcttaggaatcgtaccgttcacctcccatccggtgaattcccttgacgtggtgtctttggaagatatacggattgtatgcgtggcctatgaaacggattccggtatttcagtggcagtgttctgcattgattctttgtctttgaaatatctagcggtcggctggaacgcaaccgaggcggaacagaaccaagtcttgcgtcgtgccggtctgctttctagaaaataatcttcgataaccaggtttaatgatcgattttaacgctctttttgctggcgatacccctgcgccccaaaccatgcttcccgggggagtttttacctctcctgaccccacctatgcagatgcgcccacaaaccctgaagagatagtttccgggttaaatgacccgcaacgacaagcagtcgaacatcaaggtagcccgctgctggtaatggctggcgcgggatccggtaagacccgcgtcctcacccgccggattgcctatttattggccaccgggagggcacgtcctcaagaaatcctggcgattacttttaccaataaagctgccgcggaaatgcgggaacgagtcagcgccctagtaggggcacaagctgggcaaatgctggtctcaacttttcactctgcctgcgtgcggatcttgcgtcgctatgccgaggctgccaatctaaaatcctctttcactatttatgaccagaacgacgccactcgtttggtgtcgatgattctcaaagaagcccagcttgaccctaagcgctttgccgcgaagaaaatccaaaatcggatctcggatttaaaaaattccctgattgatcccgatacttttgtcagttctgcagggccgggtccggatgaggaagtactggccaaggtttacccgatttaccaacgccgcctaatcgccgccaacgccctggattttgatgacttgattatgcgcacggtgcagctgttccgcaacaaccccctggtgcaagccagtttctgccaccgtttccgccacgttctggtagacgagtatcaagataccaaccatgcccagtatgtgctggtaaaactgctgtcgggagtcgcaggcgcggcagttaatcacccggagcaagtatcgggggaatcggtcactccggcggaacttacggtagttggagactctgaccagtctatctatgctttccgcggtgccactgtgcgcaatattgaagagttcgagaaagattttcccggggcgcgcactatttacctagagcagaactatcgttccagtggaaatattctcgcggccgctaacgcagtgatttcgcataaccagagtcggcataagaaaaggttatggactgattctggcgagggcgagaaagtggggctgcgggtatcttcggctgaccgcgacgaggcgttagcggtagtggaagaaataaacaagctagtagccgggggatacacctatggcgatattgcggttttttaccggataaacgcccattcgcgtctcttggaagaaactttgacacatgcggggattccctaccggattatcggcggcaccaagttctatgagcgcaaggaaatcaaagacgcgattgcctatctgcagttggtggttaatcccgatgacaccgtgtctttcacccgagtgataaatactcccaaacgttctctgggaaacaagtcgcaagaggcgctgcaggccgcagccaacacctatgatatttctccagggcgggcggctgcgttggtgtggaaacaagagctaggggaggaacgctcttgcgccgccgccgaccccaatctttcaggaatcagcgaggcaactgcagattccgcgcaggtgccaggattaccaccgcgggcgcgtaccaatatcgccaaattctgggattgtttagtttccgcacgtcaagcctatatcgagggtgcgccgttaaaagatattttacagacggtactgaccgaatcgggatatttgaagtctttggagggctctaaagatccccaagatggggtgcgcttggataacctttccgagttctataacgtggcttctcagttcagcgaagatgaaccagaaggtactttggtggatttcctagagcgggtcgccctggtggcagacgcggatcaacttccaggtgaccagcgcggacaagttactttgatgaccgtacatatggctaaagggctagagtttccggtagtttttgttaccggcctggaagaaggaaccttcccccattcgcgagctttgggtgaggctggggaaatggcggaggaacgccgtctggcctatgtggcgattacacgcgcgaagaaaaaagtatatttgaccgccgcgcataaccgacagatgtggggggaaactcgctggcagccgctgtcacccttcctgctagatgttcctactgaacttttggatgagcctgagcaattgagtaaggacagtgggcagttggatttttcctccgatacttcctcttggagttacggaggcagttggggaagcagttcccgcgggcacactggcagttccgggtatcgcagccgcggccagggctacggacagcgccgctctggcagctatcgggatgaggacgtctcgggtcctgctttcggagcaggcggtactgggaaggtgtcgcggcgagagaccgggaaagtaaaacgtctgggtaccgagctgaacgcgcgcaccgatgccaatgcttccattggtaaagccgccggggtaggaaccggggatcgggtacgccacgacaagtttggtgagggcagggtgattgcgatcgagggtcgcggtcgttcccagagtgccaaagtggaatttgctgggggagtcaccaaacgcttactgctgcgtctagcaccgatggaaaaaatctagcgcacttgcattagctgctaaatgattatcttgattagttctacttaaaaatattggggggttgggcaagaatgcccaaccccccaatattttgttctcccgtccccgcagggcgggaaaaccgaaaaggagtttagaggattcccagttccttaacggtggcgatttcctcttgcgcagccttcgcgttcttagcaatatgctgcttggtcttttcaggtagttctagcccttctaccacctggtacttcccatctttgcagatgacgggcataccatagatgaggccttccggaactccgtattccccatgagaggggccggcgaaagtagaccagtcgccctcgggagttcctagtgcccaggtgtgcatatggtcgatagccgccgaagccgccgaagccgccgaagaagcgccccgtgcctcgataatggcagcgccgcgcttggctaccgtgggtacgaagtagtcgtccagccaagcctcgtctaccagttccggagccggcttgccgtcaacggtagcgaaggtaaggtcgggatattgatcagcagagtgattgccccacacaatcatcttcttaatgtctttgaccgcggcgccagtcttttctgctagctgggagatagcgcggttgtgatccagacgcatcatcgcggtaaagcgttctgccggcacatccggagctgacttgcaagcgatgtaggcgttggtattagcggggttgcccactaccagtacccgaatatcctctgcggcatggtcgttaatggccttgccttgcggaccgaaaataccaccattggcggccagcaggtctgcgcgctccatacctttgccgcgcggacgagcacctaccaaaaggccgtaggagcaaccttcaaacgcctggttggggtcatcataaatatctacgcctgccagtagcgggaaggcggagtcgtttagttccatcgcagtaccctcggcggccttaaccgcttgcgggatttccagcaggttcaacttgaccggctgatccggtcccagcatagcgcccgaagcgatgcggaacagtagggcatagccgatattaccggcagcaccagtaacggttacggtaacgggtttcttgcagcagcattctgccatgtgattctccttcagtgagaaattttcttaccgaccgcgcgcggccggccaagccaactagacttatgctttaaccctagcgctttaaggtggcatctgccactactaatttttatttacagcaataaaactgcagataacatggtgcgtctcgatatcgagaaataatttagaccttcgtttattcgggctggttggatttatcgttcctaaatttttcccgaggacgcgcaggggtatccgcgcgtacgactattgcttgactccggtaaaaatagtgtgttcgtagaggaaaaaacgcagaatagtacccaataccagcccaatcacattagcggatatattatcagccagcagcgaggtgaatcccaataagtagtggctgatccctaaacagataactgcaggtagcatccccagtacattaactaccgcgaatcccaggaattcttgcatccgccggttagttcgtttattgcggaatgtccaatagcgattaaccacccaagaaaaaatggtagctactgccgcggccaacacttttgaagttagcggatgagaagataaaatcccggttcttaataggttgaatgctgatacgtctactaggtagttcatcccgcccaccaggcaaaacttaactattcggctgatgcgtcccggggagcgtagataggcgtaaagttttcccacagcttaagattacaggcgggaatataccggagttagttgcgcggtacgagcatttgaaagccggtcgctgcgccgcccatctgcgagctggccttgcgcccaattgcccaggcaatacatgctgttctgtttatcgagcatacaggtgaaggtattacccataaacagagtggaacgggcattcgcccccaggcgagcatctaaaccgctgagggcgggagcagctccaatagccgttgagccattggctgcaacccgcttggtgagaccgatactgggaccgagttgtccaaagtcattgcgcccccagcagtaggtggcgccgccagtggtaactgcgcatccgccataaaatcccaggtaaacttgccctacttccggcagcgagctgaccagttccggttggaggatccccagattattggacatatttccgggttttcctgcctggccgtcgctgttgatcccccaacagtaaagccgtttattttcggcgatcgcgcagctgtaatcaccggctgcccgcaaggacacaaacttcatatcggatactgccgtcgggcgaagttggtaatctaccactagctcgttattccaagaatctaggcgagacttaactccccagcaatacacggtgccatcttgtttgagggcgcaggtgtggtcattgcccgcggcgacctctttcacatcggtcattaccgctactggtttcagttgatttccgatattggtactgttgcccacttgtgccatttcattagcgccccagcaggtaagtaccccggagtttgaaagggcgcaggcgtgacgtcctccagcagcaatctgcacggtatctgccggtagcgccgtaacccgcaacggattaaaagagccggagagctgattacgagggcgcgcctgccccaactgcccataggcgttatcgccccaacagtaaacaaagctgtcggtacccagggcgcaggtatattcgcgtccagtggagatttgggtaaacttcactggctggttagcgatagtttggggggtaatcgccggttgcctggtgataggaacccccaactggccggacttgttaaccccccagcagcgggcagtgccatcggtgcgcagaccacaagcgaaagaaccagatgctgaggcgcgccgcaaatcctgggcgacccctaccggttgcaccgtttccgagggtgcaggagtttgattgaaggtaggaaccggagaagggccaggttgtactgggcgcagtgacaagatgatgcgcggcccgttaaaagtaggagtcggagaaggcccgggtagcaccggatcgtaatcagaatcagaactaggagaagcggatgtaggctgaggattcaccggggtcagagtaatttcataggtaggtttggtatctcccgcaatcgaaaaagtaggggaaataactagagctcccaaggccactagcagcgctaatactgccagggttacttgcagaccaatgcgccgtttcgacgctgcgtcacgcaccccgctcacctcccgtcctacctcgggaatcctacaatccttctgagtacattctaacctatttttaacaaactttgaagttaaaaataggggaaatccaggctaaattctacttcgagggtcgttaacgatagcaggacttacgcactagggtaacctgtctatatgagcattttagtagtaggtggcgccggttatattggcgcgcacgtggttcggctcctagctgagcgcggggaaaaagtagttgttatcgacgatttgtcttatggcactccagatcggattggtgacgccaaactggtgcaactagacgtggcctcttccggagcgcggaagaagattttccaaaccctgattgatgaggacgtaacggcggttattcactttgcggcgcgcaaacaggtcggcgaatccgtagaaaagccgatgtggtactaccaacagaacgtgggaggcctagcgaacgtgatgtccgctatgcgtgatgccggtacccggcagatgattttctcctcttcggcagcggtttatggccagcccgatgtgccggtggttcccgaagaattagctggtaaacccattaacccctacggggaaaccaagctgattggcgaatggatgatggcggactgtgaacgtgcctggggtctgcgctggattggtttgcgttacttcaatgtagcgggttccggttgggacgatctgggtgatcccgcccggctcaacctgattcccatggtgttggagcgcctatccaaggggcaaaaccccaagatcttcggcactgattatgagactgctgacggtacctgtgtccgggattatatacacgttcgcgacctcgccgatgcccatctgcatgccctcgactatgtggcgtccggccaagaaatggaaaaccatgttttcaacgtgggaactgggcagggaacttcggtacgggaaatcgttgagggaatccatgaagttaccggcattgattttaagattgatgaggaagcgcgtcgagccggagacccggcgcagctaatcggggataccacccggattcgggtagaactcgattggaaagcggaaaacgggattaaagaaatcctggagtccgcctggagtgcctggcaggacggccccgataaaatcccgggagtatagggcggctttaggaaaaacactttctgtaccctggtaaaaggtggcttttgcagggtacgggaggggaggcaattctccttacccgaaatatgcgagggattcttgagctgcttgccgcatgccgcttccctgtagctactgaaactggtgatattgactaggttgcagcgtacccttttggaaggcagaccagaaactcggggtcttctgtttatcgaggagcaccattgccccgtgcgcaccatcatagtaggccatattggcgatcggaggtgccccagtgagtctattcttagcggcgctgcggtaggtgagtaacagttttccgagcgcccaggcacctgaatcagtatcgcaagtaaggttttgggcgcctgcgattgccaggtcgcgctgcttaaaaggattcaaaaaggtagagggggtaatcagagtatctgccagtttggaaactacctgccgctgtcgctccgccctaccaatatcacctttagggtcttgctggcgcatccgggagaacgctagcgcggtcgccccgtctgcctgatggcaaccgctttgccacttcaaagcagaatcggggtcatcaacgtcatagtcaaggcagagttcaattcctcccacgacgtctactagctgagtcaccgatcccatagtgacttccacatagtgatcaacttttactccgcttatcccttcgaccgtttttaccagtagtcttggtcccccgaaagagtaggcggcattgagtttattttggccatatccggggataactactgcagtgtcccgggggagggatacgattgctgacattgaatttactttgcgtaccagcataatcgagtctgagcgggctcctatatccgctccagaaacgccgccatcgctaccatcggaacgtttatcggagccggcaatcagccaagtttcgccctcgccagccggcagagtcgaaagggcctcaactcggtttaactgtgaattcgccagatggcaaagatagagtggccaggcaataacaaaaataagggtcagagtcagaactgctgcgaaaatgcggcggaatttaaaattggggcgagaaatccgacgttctttagtagacggaattggctctaaacggctaggagttttcgggctttcctgatctacccgtgatttctctgctctttcttggggcaatacccgggtgcgcgagggggctggacgtctggaaaatcgcgaaccagtgcgtgattgcaccggaatttcttgggcgttagccaagtgcgtttcttctcgccgcgtcggagtgctttctagctttcttgagattgcagggcgagcagcatgcccaccaggggtatgggagtggtgacctgcttcctgaatattgccaggagaggaggatgtttgttgattagttttgtttgagccccctgggcggattcttcgttccttaggggaataggaaggaggattttcctgcctgcgctgggggcgaggtcgtttaggcggggtgaatgactctggcagatcctgctgactcaagttgcttactccctgattaaaacttgggtatctgacctattttttcgcttcgcacttcctttgcagttcgactaggtcatcgtttggtttctgagaactggtggcatccccgttattttgggagctcgaagaactggtggtaggttcagggctcttggtggcgctttcaccgctggagctggttgagggggaagttgaggtttccgcttcaatagtgtaaaccttgccattagcgtcacgaacttcgattcctgctggtagcggggtgtcattgataaaagtatcccagataggtcttatttcattcgcgtttacaatcacccgattggggtcatttggtgcaggatataccggcagggtaacgaaacggagattctctggctttaaggattgcaatgaccagcctaaaccagccatttcggacacggaagatatcccgtcagaaatgcttaatgagctcaagccgctaccgataaaatcgtaaagctgattgagagaggttaacatatttttttgcagggcggtgcgcatcataatccccatgaccgcctgttgccgttcaatccgttgcaggtcagaaccgtccgatccttgcactccgtgtcggacgcgggcataacctaatgcttgcttaccatcgaaatggacgcatccgggttctaattctaggccagaattccgctggtcatgaatctcggtgggaatatagacattaatccctcccagggcatcgatcatggaagcaaatccgctgaaatcgaccactactgattcgtcaatccgcatcccagaaagcttttctacggttttccaagtgcaaagaaccgctgaagtccggtcaccgtcttcaccgccaatggagtatgcccagttaaactgaactcgttgcggtcgcgattgtgttccgtctttatgttcacaagcgggaacatcaacaattaaatcccggggtatcgaaactacgtttacatgggaacgatccttggaaatatgcataaccatggcagtatcggatcgctctccctcgctgccatcgttgattagagcctgattgtcttccccggtgcgagaatcagaaccaataatcaaaatgttgataggacgcccactataagaatcaggcggagtacgtcctaacttcttggcagtgctgatattgttcacacgactagataggtcgtggtaaaccaagaaagccccggtgagagagaaggatagggcgaacactaaggcactgattaccccccgcagcagcctacgcgggtagggcggattaacagcgtgacggatgcgccctaggtaggtttttgcgcttttcttgtgcgaactcacgtgtgccactctatactgtcttgactaaattgtaacgatttggataacgaattatggaagttgccagttaatggggcttgttcccagctgttgcagcaaagaattagtgcgcgaaaaaggacgggatccgaagaatccgcgagaggccgataggggcgagggatgcgctgactgaacaatcggagtatttccaagggcgggagctagggattgagcttgtttgccccagagaatagccaccagcggacgatctcgcgctactaaagtggaaatggcgcggtcggttacctcctcccatccgcgtccgcggtgagagccagcttcgttaggggtaaccgtaagaaccctgtttagtagcattaccccctgctctgcccaggggcgaagatctccgctggtggggacggagcaccctaaatcgtcatggagttccttaaaaatattgtttaaagatttcgggatagccactcccggttttaccgagaaggatagccccatcgcgttcccgggagtcggatagggatcctgccccacgattagcacttttacttgatcaaaggggtaggtgaaagcgcgaaaaatatccccaccggagggaaggtagttgttgccttcatggcgcagcatctcgcccatttcggagatcttcggggcggcaggattcattacctctgcccaggaagggtgcatgatcttttccaggttggtgctcatagtttcattttaacctgttcgcctagctaagctaacgcgggtaaatactgattctcggcgtggcagtcgccccttgactggtcgaatacggttaatctgtctttgtgagtaaacaagagtttccggaagatgagttcgatgcactggccgaagaaggcccttcaggtgctcatcgccgccctgtaaggcgctggcaggcgttgctacctattctagtggtgctggtgctaggaccggctttggcctggggtggggtggcgctgatgaaaggtaccgggcatacgcaaactcctgctgccactaaaactgcaaccacaactactgcagcgactcctactactagccctaaaaaaattgctaaacccagtgagtcttccaaaaaggaaactgccaccagccccactgccagtgcttcggctacgaataaggcggaggcgcgagtgcgggtgttgaatgcttctaatcgttctggctgggcaaaagaggtcgcggataaactggcggctgacggtttcaccaacccgaatgccagtaattctcaagctcgcggattaaaggattccacggtgctttatcgcggttcccagtttgaagctgctgctaaagaggccgctaaggttgcaggcatcagcaatgtgcaggacgccgatagcggcggatatcaaatcggggaaaccgatattgccatttatctagttcgctgacggttgctactctcggataggagtcagggctgttactgcggaaaccagctgcttcagctagcttgattcactttcattcccgataacctattgcaaaatctagaagtttcactcagagggtattttctattctgttttcgcctgaaagtttgcacttgccttaggagagtgccaaaatcatatttagcactcgaacctagagagtgataaaaaccgagtccttggtgagggggcgacgttccgagacaggatcggcgcggagtcctcgtccgtcgcgggcatcagggctgggtcaaagatctaaccgcgtgacgcgaacgtgtcgcgatggagggaatacaagcatatgagcaagattattgcttttgatgaggaagctcgtcggggaatggagcggggtctgaacaccctggctgacacggtaaaagtaacgctggggccgcgtggtcgcaacgtagttttggaaaagaagtggggagctcccaccatcaccaaagatggcgtgtccgtagccaaggaaatcgaactcgaagacccttacgaaaagattggcgcagagctagtcaaagaggtcgctaagaagaccgacgatgtagcaggtgacggtactactactgctaccgtattggcgcaggcgctggtacgcgaggggttgcgcaacgtggtggccggggcgaacccgattgctctaaagcgcgggattgacaagtcggtagaggcagttgtggatcagctgcacgccgacgccaaagaagttgagactcgtgacgagatcgcggctaccgcgtctatctccgcaaatgaccccgagattggggctttgattgcggacgccatggaaaaagtgggcaacgaaggggttatcaccgtcgaggattccaactctttcggcactcacctggaagtcaccgagggtatgcgcttcgataaaggctacatctctggctacttcgtaactgacgccgatcgtcaggaagcggtgctcgaagatccctacattctgctggtggaatcgaaagtttcccagattaaggatctgctgccgctactggaaaaggtaatgtccactggcaagccgctgctgattattgccgaggacgttgacggagaagcgctgaccaccctggttctgaacaagattcgtggcaccttcaagaccgtagcggttaaggctccgggattcggcgaccgccgcaaagcaatgctccaggatatggcgattttgactggcggtcaggtaatttccgagaccgtggggctcaccctggaaaacgcggaactggatatgctgggcaaggcgcgcaaagtggttgtcaccaaggacgaaaccaccattgtagaaggcgcgggagctggcgaagatatcgaggcgcgtgtcaagcagattcgtcaggaaatcgaaaacaccgaatctgattacgatcgcgagaaactgcaagaacgcctagccaagttggctggcggagtcgcagttatcaagtcgggtgcggccactgaagtggaaatgaaggagcgcaagcatcggattgaggacgcggttcgtaacgcgaaagcggcagttgaagaaggcattgtcgctggcggcggggttgccctgctgcagtccggtctgaaggctttggacagcttaaagctagagggcgacgaggaaactggcgcttctatcgtgcgggtggcgctgtcctccccgatgcgtcagatcgccgagaatgccggtctggaaggctcggtagtggctgaacgggtagcgcatctgcctgctggccagggcctaaacgctgccaatggcgagtacgaggatctgctcaagagcaatatcgctgatccggtgaaggtgactcgttccgctttgcagaacgcggcctctatcgcggggatgttcttgaccaccgaagctgtggtagctgacaagccagaacctccggctcccgctggtggcgatgatgctgcagcagccggtatgggcggaatgtactaaaccgggtgtaggctgagcggtctagccgctataaagctgataccaagaagtgggggcgaaccgaaaggttcgcccccactttgtctgccattttgattaaccccgaaagtaggttacggctatttttgatagttgttgcctggtgttttgtttgggttggtttattttcgggttgtggtttctttggctacttctaggaaggctttgggttcgtgtgcgaagcgtcctaggaatagtccgtcgatggtgttgtcgagtttggttattagtcctggtcctgctgagccgccgtagagaatggttagtgaggctagttcgggtaggccttctcggatgttttggcatatctcagagacgtattttgggcttgctggctgcgcggcgccgatagcccagtagggttcatatcccagccatatttctgtgggtgtggcgtatcttaatgcggagcgtacttgttggatgcatagttttgctgcttgtttggggctggttttttcgggttcgcctatgcatagcaagggagttatgttgttgcgtttagctgctgcaacttttttggcgatcatgtcgtcgtcttcacggaaaatggttctacgttccgcgtgaccaatttctgctactttgacaccgaaatttgctagatctgctcctgaaacttcaccggtaaaggctcctcggtcttcataggctagatcttgggcacctaggataatgttagtgtcttttagaatttccgccgcttgggggatggctaaaaagtccggcaggatcgccaggcgtacattatcgattaaaccctcttcgctggcaattaaactttttaattcacgacaatattgtaaagtacgcgattgcgaaaaatacatttttaggcttacagcagccactggtttattcatttaattctcccgaataggtgaatagatagctagttattctgcttcgtattcacagattcgggcaaccttatctttgctgcgcgaattaggatcgaaatcgtttttaagatattcctctaaaaacacttctgcagatttaatacctactacctgggaaccaatagcaatcatgtttgcattattgctaagggtggctcgctgtgcctggtacacatcagcgatgcaagcgcaataagctccttttaccttgtttgccgctattgaaaccccgataccggtaccacaaaccactacgccgcgatcatattcaccagctgccacggcctcggctaccgctaccgcaacattagcgtaaataggatcatcggaaccaaaatctttaacctcatgccccaaatcctcagccttagccataagagcctgcttaagatccgtagcgtttggatcacaaccaaaagcgagtttcattattcacctaaccttattaaaaataaatacttacattctaggttaccttatctataagaaattcataccttttaggtgttatttcttcctatttaggagtaataaagacatctatagagcacattcgagatactttaagattatgctggtttgtggttcacaactcgtctaatatggatggtatgaaatataggcggttaggtaattctggtcttcgcgtttctgttttgggatatggcgcaaataatttgggtcgaaagggatcggcttctgaaaatatcgcaggtgcgaagaaagttgtggatgcggcgttggatgtaggcgtgacctattttgacaccgcaaatgtttacgggcatgaaccgggactatcagagaccttgctgggacaggcactaggtaagcggcgtggcgatgtcgtgattgcaacgaaatttgggttacccatggcaggagagcctagggaattagcgcgtggatcgcgtagatacattatgaagcaatgcgaagcatctttgtctcgactaggtactgattggattgatctttattactatcattcccctgacaccctcaccccaatcgatgaaaccatcgatgcgttggacactttggtagatcaaggaaagattcgttactacggagtgtcgaatactactggatggcaattggcggatgcgtggcatcattcacgtcgagggcgacttgttgcgacgcaaaatcattacaatcttctcgatcgccgagccgagcaggagattgttccggcagcgcaaaattttcacttaggcctcgttccgtattatccattggcggcaggtatattgacaggaaaatacactcagggagtgcccaaagacgcccgattgaagccgggagatccaaaacttgctgcagccaatattgaggtcttgcgtgaataccaggacttttgctctcaacgcgatatgcaacaggcatcagtagcaattgcgtggcttgcttcgcagtctcccgtggcatctattattgcaggtgctacccgtcctgagcagatttgtgcaaacgcccaagctgttgagcttgagttgagtggggatgatttagctgcgctagacaggattttcccccgtcccgaaaaggtagcgttgttctaatggatgatgagattgaggcaaaacttgctgttccaccaacaaaacaagatttgagacgggacgctattactgagcgcgttcttgagattggatctgtccgcatcgatacgctggttgatgaacttggcgtatcgaggatgacgattcaccgcgatctggatgccttggaagcaagaggcgtgctgcgaaaatctcggggtgtcgtaactgcggtcgcttcgagcctatttgaagcgtcaactgattatcgtttgcggcagcagtccgttgagaaacgtgcgattgccaaactcgcctttgagttgattgaacccggggaagcgattgtgctagacgactcgacgacaggcttaaatttagccgaattgttgccccagaaagaacctttgacagttattactaattttgggcgcgtactcgacatgcttggtagcaagagaggcatctcccttgtctctacggggggagaatattaccagctgtgcgatgcctataaaggtaacctgtcgctttcggctttgagtcaattgagcgcagacacctatttcatgtcgacacctgctatcagtaatggtgtgtgttttcatcaacagcctgagttaatccaagttaagcgcgccatgttcaaatgcgcgaagaagcgtgtgctaatcgctgaccatacgaaattttctaagcgagcgttgtattcgatgatgccaatcagtgaatttgactttgtaatttccgatgcagcgttaagtcgcgaacatgttactgaacttcggcgaagtggtgtgcaactaattattgcgaagacgcgctcgggaaaaactgagattagttagtcccgaacgcgtctgcactggattcgatggcgttcctattacagtgtagtcagcttattgttgagaattttgtcggagaaattattatattttccgatttcccattcaccattaatcatgtcccacactatggtgttcaacaggtcagcgaattcttcgtcaagaatatggtgatctgtccagatgagatctaccacatttgtatcgaccttcgaccacatccgcttcagcatggcagttgcccggcgcgaccactgtggatgcttctcatcgggttcccaaaccggcccgtcgccattcccttctgcccagccgcgctcacgcgtacacagggcagcttcttggtcataagcggaccagccgcgcataggaattacgaatgcgcagggccccttagaaccattcaaggtatcggcgagaaaatcagagagttcgataacttctggaatggtaggaaccatctcagtgacgttctcattgtgaatgtaaggcttacctgtatcgcggaagcctttacgcttgccggtgcggaagtcctctacatattcttccttcatggtttcaaacgcgccataggcgcattgatccaaacctccaggtacaactacattggggatacccatatccggcgcagcagtcatacgttctccctgccaagttttcggtgttccatagacggagtcgtacatattattggttaattcaccgggcgtcatatctacaacagcagtgatatcaccggagcgaatcaaatcttccatcgtggcgccaactcccacagcgtggaaagtcgagcagtcccatccatgatcgttgaagaacttagtaattcgcatctgggtaggtgtcgtcgttccatagctagtaacagcggcaagcggacgtccaatcggcgggtcgtcaaccttggccatggcaacaataccggcgcaagcttgcgtgacaatctttgaggtcactgcagtgataccttgttcagcggttggcgagacaatgaaaatatctttattacccagccatcctgacacgtcagatgatgccatatcggtcatcagaatcttgggaaccccaaatggtagcgccctcatcgcaatcgaaacggtggtggatcctactgaacccgcccaactaatgataccgtcgcatcgtccttcatcatgtagcttgagagccatttgcgcgccggcttccccaatttttttaatcgcgtcagctcgcggaccagcaaagacttcatccatgtccaaagaagccaactcgccaacctcctggttggaaatgtcagcaaaatctacactgccaccaagcgaaagatccataatcaacggttcaccaccgttggcacgtacctgttcggcaacgaattggatttccgtaccttttgtgttgcacatccccgtacacaagatgacgggtttatcttttttattcatctgttactcctttgtcacaggtgactactagtcattgagtatgtttttgtattcacgagtaattgccaaaattgctttttcaattggcatgcgctccgcagcagaaccgccgatgaaaccatgcgcagaagtatttttaattacgtgcgctgcttcggcgggaccttcgatggggccgccgtgtgcgaataggatgacatccggattctcttggagagccgcgtcgaacatttcttggctgcgttcggtggcttcttcgagtgtcatatcagatgcggcgcctttgagcccaccgactgtagaaccaaagtgagtggcgatggaatgggcaccgacgctggccatcacttttgcctcttcgggcgtaaaggcataagcgagggtaaacatatccatctttacagctgtttcaatgaattcgacttcgcgcttccagccaatgccgatcttgtccatctgcgctaccgtttcatctccgtaaatcttgatcatgaacgggttaattccgctcacgccggcatcccgcagccgctccagatgctctttatgcggcaacagcggattaaaggctccagatagggtcatgaccggcgcttcagaaacattggcgacgatttcgggaagtaaatcaaaaaggacctggttgatatcactgttcggcatgagtgcagagagagatccttgccccttcatccgccagtagctcgtcccggaggcgataattaaatcagccccgcccatttcctgtagttttgcagatagtccgaatccacagttcggtgcgaataacggcctgcccgcgtcaatctctgcgcgtaaacgggaggtaacttcttttgccgtgtagagttttgccattgcattctcctttgaataatcgggaccggtcattaggttccggtcagagttggtagcgattcaaaaatgcagacgaattgacgtcacgaattgcgacgacgtcgtctgttgaaatcacaggatcgggggtctcctgcaactccgcaataagcaagtcgaggttacccagtgttttttcgtaactatagaggggcatatcagatccgaatagaattcgatcaaccgcccccgcccacgtcttgaccatcgtaatgagatggcgcaaggggtgggtctggaagtttggatcgcgtccaattactgagctgatatctacgtatacattggagtgtttccgcagtaatcccgccgttcgagaaaagtcgatacgccccgcatgccccaggatggctggcatttgcggaaaatcgcaaaatactgagtcaaagcgattgacgctcgtatactgatcattgagcggaaggacgccgatatcacccgagtgaaaaaggacgggtttctgtgcttcttccagaactttataaattggccacagctgcggatcatctacacccatattttgaaatgcgccgtggaattttaaacctttatggccgttcgcgagtgcttccgccacaattttctccgcatgtgggctgcgcggattcacacaacaaaacggaatcaaacgctcaggatatttgttacattcgcgtaaaacgaaatcattgatgcgtctaatatgtgcatcagataaatctggttcatatgcaagggcgaccgcaatcgacaaattaatgccgtttttatccatagcagcgattaaagcatcggcatcgcaggaaagtgaacggctggagtcgtagccgctaatctgaggtggaatatccgattcttcccaaatatgggagtggacgtcgacgcgtttgctcatttgactactccaaatacatctaaagcggttgctaattcgctatgttcgcgagctgcttcttccaatgtcacaccatccatgtaggcgtcaattgcttggcgcatcgccctaacgcctgccgcaggtccttgggggtgtccttgaatggctccacctgatgccagaacgatatctgtgcctaagtcctctaaatatctgtatacgaccccgggcttaactccccccccaacgaccgggaacgacggctgaaggttgctcattggcgtgagcattttgcgcgcggtagctagatatgccgctttccgcatgggataaccactgtagggagtgttaataaccgccatgtcggcacccacgagccttgggaaaaacccgagcgctaaggcagctgacatgccggaggaagcgttttcgtaataggtattagccgaggcatagtggccgagaattggcacatcaaacttttctcgcaattcgacgacgctgccgtacccgaccgcggcatagcacaccatgagtgcgcgcgctccggcattgatagcgcgcttggcattttcgaataaagccgtgccttgcgcagtgatattaggtacgtagatggtacggtggccagtttcttcaaaagcttgctgtgcagctttgttataagcggtaacacgctgatcaataggagagaattcggggtctcccatgagttcatcatctttgattagatcagggccgcctaatgctgtctcgcggaagatttcacttccctgagctggggtaagaccagtgcatggtttgatcatgttgagtagaagcgggcgcgaagggatgccgagaagctttctgatcccagccacaccatgctttggacctggaagcttgcttgtcatcgacgcagggagctgaacgtcaacgagttttgccgccatggaagtcgaggcgtcattgcccagcagcgaggtaaaaagcctcggtatgtcagctcctatgctcaccgccggcaaggaaagagttgcggtgtacgttgtggtatttccgccttcggttaccagatcgctgggatccagggttttaatgtcgacgacttcaccttggtagttgtcaaccatttcttgtgttagaccgggaacatcaacccaggttccaatagtttgaccgattgcgaaagcgcgaactttttctagggggtcaacatcggcagggatggaaaaggtatatgtcgcaagaaccgcgtcattcttgttggaagcctgtggcatgttgctccttcgcattgcttaaaatgttacatgtacatgatatatgaaccaatgcggatgttgcaagtatgtataaaaaatgtgatattttggtatagagcccatttatttttaaggattagagctatgcaaaaggttgacgcacgtattattcttctcggtacagcaggtggcgcagtgacttggggaagtgcggattcgtcagctatgtgccgctacgggacttcaacggctctagttattggtggaaagatttacgtcgtcgatttcggtatgggtgttgcgcggcagttaactagagcgaaccccctagggcgtccggaatcacaaatattcgaagacttgcaaacgttgtttatcacgcatatgcattctgatcacacattagatctgtcaaacctgttgttgtgcggatataaccaggggtggccgtcgcatcgagtggaagtgtatggtccttgggacagagttcttagccctagtttttactcggatttgccagagtcggatgtatggacgccaggtgctgaaaaattcgtcaatgatctactggtcgcatttgaggccgaaactttagacagagtctatggcgcaaaaaaacgctctccgcaggacatgattgtcggcgttaatgtccaacgtcctggggtaatagaccgcgacactcatgggaagttttgccaatctggggaagctgaccctgaggtaaaacttaaccacaatgaagcgcctgtggatccgttcttcgtttacgaagatgatcgcgtgtatgtgaccgccacactggcggaacatggaactatgtatcctgcatttgcctaccgttttgacacggatgagggatccgtagtcttctctggagatactggtccttctgagaacctagtacgacttgctgcggacgcaaatgtgctgattcatgaagtaattgatccaaactatgcgcgttggcaatttgggaatcctccatatacccccaagcagcagcaagcactagatgtcgtatttaagaaacactgttcggtcgaagttgtggggacgattgcccaacgctgctcagtgcaaacattggtgcttaaccattttgttccgggtaacctgccacaaggattatgggcttcgaaagtgaagggattcgatgggcgcattatcgaaggtcgcgacctggacaccgtgtatcttgctaacgtttagcggaactactgtgcgatctaaccgtgtgcaggtgtttggatactagaaggcattctctaacagcagagagcctcagtaactaagcaatataaaattttaaagattgaccgtgcgttgctgaactgcaaaatagagctagctatttctgtaagagagcagatgagggcgattaccctctacaaatagtgactttgcgcaacccaattttttcgtagccacccgcaaagaatttgaaataaaagaagcctaataactgggctgatatccacttttgtttttatttcactattcttacgggtggctacagataatttgtggttttttagcttttggataactcacgcatatccatagctggttctgtcagcaggcaaacactaaggagaggaaaagtaagtttcgaccagggtattaaccagcaaacatggcggccgcgccactttcggcatcttcataactgacggaagcagcctgcaaggcttggccgatggaatcgagtgcggcttccatctgagcttgggcagcgcgccaacgggttgcacaatcggcgaaggaactggcggctgccccggtccaggatccttgcagggactgtacttgtgccatcatggctgcggcgtcggtgcgcagttgcccggcaatagcggccgcctgagctcctgctgcggacacctgactagaatctacattgaactgtgccatattgctttctcctaaaagtagttgattgattggctatcgccctcaatctagaagcgaagcaataaagacagaatagttcctataacttctccaggaaatgacagcattaagtgctgctgggtacaaatctacaaatctaactagcaccaacaggtttatatctggcagcgccgtatctagatctcggtaagcgaatcttcatcgtcggccgaagaatacatagtttcctctacttcttcttcctctggctgcggaagggattcttcatcttcggtttcatccatactttgagcagcacggcgttcaatttttgataaatcgatctttcgcatggtcaaggtggagaactggtcagctacattctccattgaagacagcccattttcggtggcgctagcagcattttctgcttgaagctgcgcagcgcgttcttctaaggcttttctttcggtggccgacagtttcactaccggaatcttggtggaagtagttttatcttccggtgtcaagatggattggcgcgacactgtgcggttaggggcagctttaatcaccacaatttctgaggtgtcggcatcggaatttttcggtttattcttagtacgcgatgcagttttttctttcccggtgggttctccgggaatcagcgccgaaagtttcgcgtattcgccctccagattctgtcgtgccgcactctcgtttccgctgcctaagggggaatggaaaatagtgtcgcgcgccagtagcttcgagattaacgagcgacgcagccgggcgtaacggagttgatccatagcagccatctccgccctcattagctggcagtaactgcgataatcctgaggggaggcacccaaatatgaaatagcggcatctacaaaaacacaggcgtctaaatcgtcagtaggaggctgtcgcccctccaacatcaaaatcagttcaccgacccgaatcgtattttctttttgcgcccccaggtgcaagagacgatccagcgcaaaatcggaagaagcaggatagttttcgtagttagtggtatttttagctctcgtctgtgactgggtaattaccccgtgataccaggcggcgacggttaaaactgcaggtcgctgcgatgtgttagtgaagtgatccaaacaggttagtaagcgaatcaaatgggaagtggtgtgaaattcgcgtccggacgactgccacatttgtaggagtttatctgcttcttttcgcaataaggcatcgtcggtgacccctagctcccgcatggctttgacgaatcccgtctgcagccaagatggtgcacctggcatagcctctgtacccccgactaatgaatgttgcagtggttatcctacggctaaaagctcaggagagaaaataaaacataaaaatactgctcaaactagataatattaaagcaggtctaggcaaaatctttgcccggaatctttggggagggcttatctgcacccttcttgaagaccttccccgtcttttttcccgcttttttctcggagcgcaaagggtcgattgcggggaaagatacccgaatggtaagtccgccccccgcagttgctagcgcccgggcggttccgccgtgcaccgcggcaatagctgccacaatcgagaggccaaggccggtgccaccggtttctcgcgaacgggaaccgtcccggcgatagaagcgcccaaaaatctcatcgagttgatcctcgggtaccccctcaccatggtcacgcacctctaaaatggcctccccggcgctaatccccgccaagatttcaaccgggacttgcgcggaagtatatcgttccacattgccaattagattggtcatcacctgggttagctgatcgcgatcggctagcaccagtgcgctttctccccggtctaactctaggttggaaccgtttaggtgcaggagactgatatctcgctccggcgaaagtgcagttaaatccagggctcccgccgcggcaattcgatacaaatcgactgcctccatttttatctgtcgcccctcgtccaagcgcgcaagtttcagcagatcctctaccagcagccccatccgggtggcttcggactcgatgcgccccattacctcgtcaacccgttccgggggtaccccgcccattttgtaaagttccccgtaaccgcgaatagcagccaggggggtgcgcaactcatgagaggcatcagatacgaattgacgcactttttgttcactgcgctgctgggtgacaatagtttcctcaattcgagaaagcataaagtttagcgctgacgccagggatagaacctcgccggcgcgtacctgggataaatcaatacgttcatgcaggtcaccggaggaaatctttccggcgacctcctccatttgccgcagtggacgtagggagacttgcaccaacacgtaggctaaaaccccgcctatcaaaataatgatgacggaagtacccaaaacgttaattccggtggcagtaactgtttgggtaacggtttgcagcggcagtgccacgattaaagttccggtgattttagcgtcttgagcgctgcgaaccggcaacataatcgcacgccaagccgaggacgattcgcctgcaattgtgaaaggcttttcccaagagatatctcgcgatttttctgcgagttccaaggccttaggatccgggcgccccatatctgcagttgcactagaggaagtagcttccgcgacctgcccggcgtagttgaccctcacgaaatagttagtgggttgattgccttggaaagtgcctttatccagcagatccaccagatcattagtttttatccgcgaggcggtagcttttaaattggaatcaatctgcgccgccaagtgggaatgtaaaatccctagcatcgcggttccggttcctcccaaccctccagcaaggagcgccataataattaacactaaacgccaggtgagtgggattctttgccagtaggtgcggtgctgtttactttctttaggtgccagattttccgcagattttcctgctgcttcaccggctttcggcaaggtcattagcgctttccagaacgaatcatatagccgataccgcggcgggtagtaataatatccccgcaagatccgggcacatctagtttgcgtcgcaggtaggaaatataggattccacgatggcggcctcgccgttccagtcatattcccaaacgtggtcaaggatttgagctttagaaactacccgcccttcgttaatcatcaggtagcgcagcagcttgaactcggtgggagagagatctattacttgcccggcgcggcgtacctcgtgcgcgtcctcgtctaaagcaatatcggccacccggatgaccgcatcttccccggcaattccccgggtgcgccgcaaaatcgcgttgatgcgtgcaactacttcttctaacccgaaaggtttagttacgtagtcgtctccacctacggttaagccctggactttatcgctcatatcgtcttttgcggtcaggaagaggatgggggtggtgaaaccattttcgcggaggcggcgggtgacagtgaagccgtctacatctggaagcattacatccaatacgattagatccgggttggcggattcggcctgtttaatagcttcggagccattggaggcagtgaaaacctcgaatccggtatagcgtaaagaagatgcgagaagatcacggatattaggttcatcgtctaccaccagcaggcgggcagcgtctttagtagtcatgcggtaattatccctaagaaacctgaatggtagctgaatgggctctggaaggcgagtgggtaaagtgttagagagttcgggtgttaatcctgcccgctcgcgggtagaatcaagccagcaaggaaaagataacttgagggaaatagcgtgaataatctgaaagaaccgctggtagtacatgaccgtcagaccttggcgcgggcagaaaaaaacgccggaaccgtggggctgattgttacccgcggtaactggcattctggacatcaggctgcttttactgaggctagcgggcgggtagataccctggtggcttcggtttataccgatccggtagggccggcctttgaaactacttccgatatgattagttccgccgatttgcagctagcggcacgtagtggggtagatattatttttgcgccctcaaccgaggctttctatcctttcggggcggcgcaaaccgtgcttgatccgggacagattatccggcaatacgaggctgctcatcatccgcagcaggcgctggatcggctaacccaattggtgaaaatgttggggatcgtccgtcctcataaggtgtttattggacagtgtgacgcccagttattagcggcagtgcgcctggtggtgcgggatctggatattccggtgacggtagaatcggttcctactttccgggatttagatgggcttacagtttcccaaactacccgggcgctttcccctgcgcagcgcgaggatgctgctgtttttgcgaaagctctctttgcgggggtgcgccaggcggcggccaccggatctggggaggcagtaattgctgctacccgggaagcgctcaatgatagtgatgccgaaattgagtacctggatttggtagatccgatttcctttgagccctggcaggcagctgctcctagtaccgcctgcctaatcgccgcggttaagttgggcgaagtgcggctgagcgataaccagttagtggtactttcccgcccctaaaccaggtcaaatcccagggcgtaatagctttaaagcggtttgcgggtcttcctgtagttttaggaagacccgcaaaccggttttatttgtttattttctagctgctagttagggcggcggcgcagtagcgcgaatcccaccaagaacagcacactcgccccgaatcccaagatggtggtatccacggctccggttttgaccagggagtcgggaatcggaactatctctgccgtacccgttccaggttttcctcctcccggctgagtgcccggctgggttcccggccgctgaccacctggcacggcaccaggattaccgcagggtttacagggtttgcagggagtatccggcttttctgaccgttccttgtaatccaaaatcacagtgaacttaacggttccgtcttcctggagttcacaaagcgtatcagccgggcatttcatcttggaaaaattctttttacccttttcggtaaggggaaccactacttccgctttcttccccctacttaccggatctttgggattgaaaggttgtcccgcatggtttagatattttacattggcgagatcatagctaaacatccccgccagcgggttcggatttccctcatcatcagggtcataggcaggcattactagctcttgccaattgccttccttgacctggtcataatcttgcgcggtgggagtttccggagtagcaatcggctctaccgatacgggagcaatcgcgatgcgctgcttgattcccgcttcattagagccgactttggatttcgccttagtatcggcggggaaagcggcattagcgtaagacagagtaaccggaatttccgctctatcgcctttcctggcatctttgtgcggggttacggtcagttctccggtggtggcatcaattgccaccttccagatttttccgttaacttctaccgtttctggtgcgctataggtggccgtggtggcgttagcagcgtccttagtgtaagtagtagttttcaccggggatttaacttccttgccgggttcggtttttacttcctcgtatttgggaggcagcatcgatagacgccaggcgtctaccttctttccggcttcgtcagccacccccgggttcactgcgcttccggcgactggcaggtaaaccccgtacccatccgcaaagttgatgccgccggtagctctcagcgaagaaccagtactaccgaagccgataacatcacctggtccggagaaattggcgcttccggacgcggcaatagcgcttccttttggagtggtaatggtggtgtctttggcggtagaaaagttggcatttgtcctaggcataataccaatcggcgtcgattctttcgatgttgcgttaatggttagctgcgacttttcggttacattgacattttgggcgctataaattccgatagtgccggccttgccaggccctttaagatcgatatttacctgcgagttccccgcaatagtggtatcagttttagcgggtgaaaacatgccgatgacattggagcctttagatgcgggattcggattactgttgatattcaacttaacatccccggaaatatttagcttcccgccatcttcggacggcttgggtctgaaatcaatcccgaaaatctgtacaaactttccggagccgttgtacccaggattaacattgacagtgcctttacctccgatattgagctgggaagcaaaacagcgcagtccagttatcgtattggggtttttactgtcggcaacgccagcatctagagtcagggttgaatccggtgtttccccttctagattaaatgtgagtgggtctcctgcttcgagagctaatgccaaaccgtcatctaagttactctcgccaccctcgatgtgtttaatcaggttatttcccttgaatttgaccgtaaccttgtcagttcctggcttatcaacatcgaattttataaaaatgaggccagcggttgaatgggatttaaagttggtatccacgagctcaaagttgtcgaaggtgaaaactttgttttcgttgtcccagtaccaccagcccttttggcctttccccttaatgttgtcggtcaagcagtaatgactgttccccatatacatatggggattttcgccacatgcgccggtgtttgtcctgcccacatcggtcgcatcctcgtatcctgacgggggatcggcttgggctaccggggatagtagcaccccggtcaggatcacaaatgccgcggccaaggcggagattactaggcgtacagttttcttcatgtttaccttctcttagtcgcgcgaagaactctcaactatctattgttagcacataaaacatggctttgacaagggaaaataggataaaaaagtctgatgaagtgtaaatcataggtttctcggaatagggatcttatagaatggtgatcgcggcgaggattctgaagtaaagccgctaactttcgcccctcgccctcggctagctaacatggagggcgtgagtgaagctaataaccagagtgtgcctgaacagattcgtatccgcgctgagaaacgtcagcggctgattgacgctggacgcaacccctatcccattgcggttcccattacccataccctgcgccaggtgcgggaaaaatatccaaacctagctgccggggaagaaactgaggactttgtaggggtcgccgggcgggtagtgttttcccgtaataccggcaagctctgtttcgtaactttgcagcaaggcgatggtactcgcctgcaagctatgctttctgccgcccaggtaggtaaagaatccctaagtgactacaagaccgatgttgacctgggagatcacctctttgtctatgggcgggtaatcgcctccaaacgcggggaactgtcagtaatggcgcagccgggcgcggacggtcaacccgcctggcaactcacctcaaaatctttgcgtcctctgccgaaaactttcaaaaccgaagacggacaggaagtttccctctctgaagaccagcgggtacgtcaccgggaagttgacatgattacccgggcagctgctcgagaaatggtgcgcacccgcgcgcaagtggtagcttctctgcgcgctaccctgagtggggaagacttcattgaggtagaaaccccgatgctgcagaccctgcacggcggggcagccgcgcgccccttcgttacccatatgaacgcctatgacactgacctttacctgcggatcgctcccgagctgttcttgaagcgttgcttggtgggcgggattgaccgggttttcgaaatcaaccgcaatttccgtaacgagggtgcagactcctcccattcccccgagttcaccatgttggaggcctaccaggcctacgggaattatcggcagatcgcggaactgacccgccagctggtgcaaaacgcggcgcaggcggccctgggaaccaccgttgctactttgccgaacggggaatcctatgatctggggggagagtgggaatggattgacctttatgggtcgctgtcaaaggccttgaaccaagaaatctccccgcgcaccccgcgagaggaactggtgaaactagcgcaggcgcgcgagattgaagtggagaagttctatactcctggcaagctcgtggagctgctgtgggaagcggaagtaggggacgacctctacgcccccactttcgtagcggacttccccgaagacacctctccgctggtgaaatcgcaccccgaaaaaccgggtcaggtgcaaaagtgggatttgtatgtgcgcggatttgagctggcgactggctattcagagctcaacgatccggtgattcagcgggaacgtttcgaagcgcaatccctagatgccgccaacggcgatcccgaagccatgcaagttgatgaagagttcttgcaggcaatcgaagcgggaatgccaccagccggaggtatgggaatgggccttgaccgcctgctaatggcgatcaccggtctgggaattcgtgaaactattacattcccgctggtaaagcgaatttaagtaacctggtcgcgccggaaaacctagcgcgtcctccaaaagttttatttcagtaattaggaagggaaaaataatgcccgtaaaaactacccatgtgggttccttaccgcgaactccggaactgctagaagccaataacctgctgtccgccgggaaaatcagcccggaccagttcgaggaaatcatcgaacgtgccgcggccgaagtggtggctaagcaacgtgaaatcgggatcgatatcgtcaacgagggcgagtacggacatataacctcgggggcagtcgactatggcgcctggtggaactattccttctcccgccttggggggcttacccaaaccgatgaagatcgctgggccaaaaccgaggtcattcgctccgaacccggcaaaattcgcctcaccaccttcactgaccggcgcgaccgcaacctattccgcgaagcctatgaggatccggattcgggagtgcttggtaaccgcaactcggtaggcaacccggtgattactggcccactcagctatattggggctgacgctgccaggcgagatgtgaatctattgctcaaagggctgcaagctaatggtctagatgcttcctccggttttattgctgccctgtcacccggatcttgtgcgcgggtagataaccgttattaccgcaccgatgaggaagtggtttgggcgtgcgcggatgcgatgcgccaagaatacaagatcatcaccgatgccgggctcacggtgcagattgacgacccttccatcgcggaatcctgggatcaaatcaatccggaaccctccctggaggactacaaaaagttcatcggggtgcgcattgaggctctgaactgggcgttaaaagatattcccaccgaacttactcgattccacgtgtgttggggttcgtggcacggtccgcacaccaccgatattcctttcgccgatattgtggaggacgtgctgcgggtagatgccaaaggctacactttcgaagcctcttccccgcgccatgcccacgaatggcgcatctggcacgaatatcaattgccggcggacaaggtgctaatcccgggggtggtttgccattccacgaatatcgtggaacatccccagctggtagccgataggttgtcgcgtttcgtggcggcagttggccccgagcgggtaatcggttcaactgactgcggcttgggcgggcgtctgcattcctcaatcgcctgggcaaaactgcagtccctggtggacggcgcacggctagtttagggcagggaaggttcgtaaagtgctgaggctttccggggcggtcaaagattacgcttggggatcaaccagcgctatcagtgactttaccgggattgattttgggggccggcgggtggccgaactttggttcggtgcccataacggaacccaggccttagcgggaggacgtccccttgcggaagttattgccgcagatccaatcgggattttaggggaggacgtttcggcgcgttttgacgggcaactgccgttcctactgaaactaatcgctcccgaacaaccactatccttgcaggtacatcccggtaaggaactggcggagtccggttttcaggcggaagaagaagccgggattcctctggatagtccccggcgaaactatcgggatcgtaaccataagccggagatgattttcgcgcttacctgcttcgaggctttcgccggttttcgcgcacctcgtcgggctatcgaggtgttagagaacctaaatgcacctttagcacgggaaatgcgggaaatcttgcgggcaaatcccggatatcgcggtttgcgggcagtggcacgcaaacttttagcgcctttggatgaggaacgtcaaacccaaatagaggcagtaatcaccgcctgccaagatcgtctggatcggggaacttccccctcgcttagggttgatcgccaagcggtcgccctcgcccgcacctatccgtccgatcccggagcggtgttatctttgctgcttaacccggttacattgcgccccggggaggctttatttatccctaccggtgccgttcatgcctacgtttccggtctcggtattgaagtgatgtcttcctccgataacgtgttgcgtgccgggctaactcccaagcacatcgatgccggagaagccctgcgctgtatggatttccacggcgcacccccggtacggattgccccagagatgaacggtcgcggaactgggatctactatgcaccggtggatgatttcgaactttccgtatctgagattaccggcgaggaatggattccgattcccgggcgcggaccgcgaatcctactgggaatctccggggatttagaagtggggattgggggctccatagaaactatccgcaccggtgaagccgtttttattgctgctgccgagggtgcagtccgctcgcgcggaaacggaaaactagcacaggcgggagtgccctaatggaaaccaaatattcctgggataaccactgggtgagcgcgcttgccgggatcccttccccccgccttacctggtatggagaacaacgcatagagctatctggccaggtagttagtaactgggtaattaaaacccaaaatcttttggccggtgacctagctgccgagcccggcggagtcttggctctagaattagggctttcttggcgagatctgctctggcgaaccgcaggctggggactgggactgaccgttaaaaacctgacagattcggtggctgctaaccaggagttagtcgctaatccgaatttagttgcttgcgcagttacgagcccagaaaccggttcctgttttctggatgccggaatcgaaacctatctggttagcctgtccccgctagcctggcgctaccctggctccctcccggcaggattcctcgatggcaaccgggaagtactttcccaagctgaccaactgctgtatcccttacctggggaaaatcttgcgctggcggatgccgatttcaaggtacatgcaaacggaaaagcaatagctgattttccttgctggtgcgaacaaaactgtccgggcggccgaatcctaatcaaagtaaccgcggattcgaatccgcaagctttagccctagtcatcgggcagatttggcgttatcagggcgccgcggtagttctggagccaaattgtggtgaaatcgagaaaatttcttctctagaacatattactaaaattattgaactaaaccgcaggtagataggcttttctagcctttaataggggtagaaaccataaaaaatacataccatttttttagctgacttccccgaatgacacgcatgtagtttatactcgtagagaaacctatttttgcgaggagaaaagtatgtggaacatattcggcgagggtcccatctcgtctaatccgcagtcctggcaaattgggcaggatgaccaaggccccctctcctggcaggaacaagcactatgtgcccaaaccgaccccgaagcgttctttcctgaaaaaggcggttccactcgggaagcaaaagcggtttgtgagctctgtgaagttcgcgatgaatgcctcagttatgccttagaaaatgatgaacgctttggaatctgggggggcctctcagagcgggaacggcgcagactgcggcgcaatgtaggttagcgcagtggcttccgcctcggaaacttccgctccctaccggcaccccagcgtgcaggtttttgtagccacgcggggacacactccctatcttgagcaaactttaaaagcgctccgctccagccgttactcgataacttccctggtaatagtggattctgatcccgcgagtgacctcacccctgatgacctccgtccctatgcacccttgcattattcgcaggtaaaagccgctaacctggggcaagcagtaagcgctgcccgcgccgacaatttggaggcagtggattacctgtggctccttcacgatgactctgcccccgatgcctcttgcctgggcgaacttatccaggcttttgaaaactccaccactttaggggtcgctggccccaaagcactggattgggataaacccgaaactctcgcctcggtaggtattcacgccacacgcggtggcgagcgcctcgcccccttcgatccgggcgaagttgatcaggggcaatatgacgggattagcgatgtactggccgtaggtaccgcgggactgttaataaaagcccagctttgggatcgcttgcgtggaaccaatcctctgcttggtccctttaccgaaggcttggaacttgggcgccgcgtacgcatggcgggctaccgggtttgcctggtgccggcggcacggatttaccacgcccaagccggcctctaccatctgcggaaatatctgcagaatcaaaactccgctgctgacgacaaaaaagataccggaattaaggcgaagccgggcggggaacagcccctcgagcctagtccgcagacggatgaacaaggagagccggcttcggactcagaagaaatcccgcaggtagaggggttgtcctcgcccccaggggtagccagcgaccccgaatatgccgtatctcaagaggatgctttactagcagaggaaaaagacgcagcggaaactggtgaccaggaggaaaccgcgggggattatcagccggaagatccggacgctcccgttcctcaccagccggtttacgtttatgatccggttccggttactccggtggctgctcaggcactccgggagaaagaaaaatcctgggcggcgcgacgcgcagacagctatatttatcgcgccctaactatcaactccctgctgctgccgctgtgggtgctatttctgcctctaaaatcggtgctgctagccctgtactgggggctgcgttcacaagggcagcgggcaacggtagagataaacgccgctaaccgggtgtggggatcattagggaagatactttcggcgcgccggattcagcggcgtcaatcccagatttcccggcgggaactttcccgcttggaagtacccgccagtcaactacggaaaaaccgccgcctgatccggcgggtaaatcgggaacgcgggcaggccgtcctcaaactaggggcggtagcaaaaactcaactcgaaaacattacttggcgcgctcaaataattacttggtcactcgccctattcttcctggtaatcagccttttggggatgcgagcattcctaggcggaatgcacggcggattctggagtgtcttgcccggtaactggcacgacttttggcttttggccaccaactcttggcgtaccttgtctaccggagtaagtggtccggctgatccgattgcctatccgttgctagttatcaccgctcccttcgctatcttagggatagcccccaccgcggttttacggtggctactgattttgtccccactgggggcagccattagcgcctgggtggcatcagcggcactcacccgcgtgaacccgctgcgcgccctgatcgcgctgagttggggagcggcgttaccactattgctttcgatgcaggccggtaatgtttccgctgcccttagccacgtgtttttacccctggcagtttggggtgtgctttcctattacgatttgcgccgcccctactttttggcgggagttttgggtaccgaggagtacctgcctaactattcgcgcaggtctgcggcagggatcggggcgctcgccctaatagttgtaagcgccggcgccccttggctctggctagtggcgttagctttggttttagtctgtgccctcagggcggcaataaagaaccatttgccttggcggcgtagctgttcgcagctagggggcgggatagcggtgctgatacccgccctggttacgctcttaccgtcttttatttgggcgctgcgtacccacagtttgcgggcttacctattcctcacgccctcctcgtttaccccgctgtcaatgcgctcgcaactgcaggttatggggcaagtattatcgggggcgcccctatttttggggataggggccttcgcctgcgtacttttggctgctgccggtgccttatttaccggacgggaactactagctactcgcgtggcctggttgtttgcccttttaggcgtcttaataggggtgttttctgcggcgcagatggtggcgcccggacaacgaccgtggccactgccggcgttttcgctgttgctgataggtttatcgggtgcgacggcgctgggatggagtacagtgcaaccagccaaaccgctgcgctatctgctaggaagcttgctggcggtggcactgatattgccactggctactgcagcaacctgggcagttcctggccctaatacgccgttaaaggcgggtgccgaccgcgctccggtagctttctcgatattatccgcctcagaaaaaagaacccggatgctgctaatagatcggcaaggtcgcagctaccaggtagcgatgcgccgagacgccggacccggaatgctggccaccaactgggtgatcagggcaaaatcacccggtcagattgccgctcctgaaagccggattctagcggcgctagtggccggaaacgaccggcagggcgcaaccctctgtgccgatttagcggtagagcaattgttgatcaccaaacaggcggcggctgatgggctaaatgccaaactagctgcctccagttatttccatccggtgtccaccaatgccgatttcagcgtgtggcgcctagacacctccaagttttctccgccgcgttcggatgcgcgggtgcgaatcgccgccggcaagcaccaggaaaccgtaccggctggggtattaagtgccgaaaaaaatatttcctcctcctccgatcagcgcaaactgttgctggcagaatctttctctccggcttggaaagctcgggtagacgggcgcgctctgcaatctcgatccgagggaggactgcaagccttcacgatcccagctggggtttcaggaaaacttgaagtgtatctcgcgaatccggggcgctacctgatgatagggctgatcctgctggtctatctgggtgctgtagccgcctgtctgccgctgggagaaaggagtgagcgcaaatgaagaaaccggctgctaactccttgatttcgttgttaaccgcgttagttatcctcctggctgccggggggctctctgtggtgctagtaaagaatttacccgtcgcctccagctcaaagagcagtgggagcgaggtggcggtaccagcagccatccagcaaatagtgtgcccgggtttgccaggtgagaacgctaaggcttgggtgcaagggatctcggcagcaggatccgcgccagcaaccgacacttccggtaaagcgttgggggagggcagcgcacaatcagtgggcaaatccgggttgaaactgcagctaaaaccggtagcaggaaaaaatgcggtcgccgtggggtacgtcagtggcagcgggaaagagggcgaaaatgggttcttcgcagaccattgtgctgcgccttctaatcgtgaatatttccttacccctggaagcactaccgggaatgcctctactttgcacctggtgaacccggcaggagcgccggtaactgcccggattcaaatctggactgagcaggggccactgggagccaaagtcacgcaaaaagttcccgggaaaggccacgcctccctggtgctggacggccaagcccccggttttacccgcctaggagttttagtcgaggccggtggagccgggttgaactcttgggtggactccactttggctaccggagctcaaaaagcgggagccgcgcatatgccttccctggcttcacccgccactcaggtgctgattcccgcagctaaaattactggtaaatccagtttgcgggtacttaaccccagttccgcggtggcgaccctccaggtgtcactactggatacgaagggtgaaacctcggtgccaacttcaaaaaagttgcaggtagctaggggagcgatttttgatatcccgctggggggagttaaagacggggtagtggcagttaaacttaaatccaatcagccggtggtggccgcggttttcgcggaggaaaccttcgccgataaaggaactttggcggtttatccctcagccaagccaactactgcaggggcagtgctggttaacgagcaagcagccaacctggcatttacaggtggtagaccccaaaaaatcgttttgatttccggagagaaaacgcaagagattactgtcaaaccgggagtgttatcgcaggtgaagttggggagcggggtttggcagtggcaaagcgaaaccgagagctacgccgggcagttagtgggggatccctccggcactttccgcaccatcggaatcgggaaggcggctcgggaagtagccgcgattccggtgaaagttaatccctagctctgcatacccgcataaatagggttgacggcgtgctgtaacaacttgccaaaggactatccgagaaaaagtttttcgccagcctaaaaatattaacaggcgggaaacacatcttcgggtaaacagctaatttcgctgcttaaatgctctgcgagcactgcttttactgcctgttctgtttctgccaaggtgtggcaacgccattggattggcagccgataaaccactatccgggtagcgagtttcccactcttatctgcaggaaatagtctgccgagcactgcccgcgtagattcccattctgccggatccgagggaggaatatcctcaaccccgaattcgatacggttaacctccgggtgtttgcgggcagctagggtcgccagatcaaccaccagttgatcgaatttttcccgtcgcgtcctccaggacggaactgtcggtaaaaaagtaactccccgcgcgcctcgtccgtggcgatctcgccggttccgtgtcaaacccctcacgagaacgcaccttaccgcgagtttggtttgggttttatttcccgcgccgctaacgtgcaattgtgcgggtaactaggaagtgttcgaaaacgggctgtaaccaggtggcggcagctactttgacctacgtatataaagattccacagctgttctcggtcccttggctacccaggcagaaccccacgcctatgacctttgcgctgagcatgccaatactctgactgctcctagagggtggcaggtagtgcggctagctagcgagttcagtccggcggagcccagcgatgacgatttagaagccttggcgaatgtagtgagagaagcctccaaacgtcgacatctttccacctccaaggtaaataagaattgggacgggcggcttagcccggaagctaccagcggcggaagcggacatccaggacacgaatatgacgttaaggctaagcagggagtgcgcccggaatctcggccagccccggagcagcgccgcggccatctgcggctgttaccggggggattacctgaccaggcagagtagacgaagctgaaatagactttccagattccgattaatgcgagtaagggcggccaatgccgctaaaaaccgcttgggcatggcagaatagaacctatgaccgtgaaaattttggtagtggacgacgatgaggcgctcgcggaaatggtgggcatcgtaatgtcaaccgaaggctataaatctgttttctgtcaccacggtgaccaggcgtttgacgtttttcaggaaagccagccagatttggtgctgctcgacgtgatgttgcccggcaaagacggggtagaaatctgccggcagattcggggggtgtctgacttgccaatcatcatgttgactgccaagtcagataccgctgatgtggtggcaggtttagaagcgggagccgatgactacattcctaagcctttcaaacctaaagaactggtagccaggattaaggcacggttgcgggggcgtactagcgaaggggaaggcgaggacgttgacctgggtgatctgcatattgacgttgctgcccatgaagtttttcggagcggggagcgcattgatctaactcctctagagtttgatctcctgttaaccttggcgcgctcaccttggaaagcttttagtcgcgaagaattgttggaagaaatttggggttatcgtcatgccaacaccgatacccgcctagttaatgtgcatgtgcagcggctacgcgccaagatcgaagaagaccccgaacatcctaagattgtgcgtaccgtgcgcggagttggataccgcgccggaggcaactaggcgtagatggatacgcaaaccccaacccagccagtagcgcgcatagaggcgccgagtagtttttggggattgctacggcaaaagcagtggcgacagagtctgcagcttctgggtactaaaactgctcagttgccggtcatccgcttctttctttcctcgattactgctcggttaactgctctaatggcgctggctaccgcgatcatgatggtgattctgattggttcagtgaccgcccatgtttcaaacggtattttccaaaaacgcctcaatattgttttgcaagacgcctccttgcgcacgcaaagtttgcaaacttcttttgattccttggtagtggattcggtggggggagtccaagacgcggcctataccctgatttcggatcagcgcgacgcttcggcaggtgccggcggagtgggggcgatgctgctaaaagacccgcacgaaaaccgcgccctggcgattaacgaaattattgacccggaacagcgatccctgattaccaagaatttacgaaaagcagtacagcaggagggtggcattcactggcagtcggtttccctaagaaattcgcagggagataaggtgcctggaattgtggtcggtacgcgagtggtgctgccgttagtaggtaattacgaaacctatctggtctattctttagactacgaacagcaaactatttatttagttaatcaagtgttgttcctggggactgcggtactgctcggggtgttgacagtactgatggcggcggtttcttactctattttgacgccggcacggcgggcagcgaaagcagctcggaaagtttctgccggagattttcaaatcaagttgccggttcggggcacggatgagttggctcaactatcccaagctctgaacaatatgaccacctatctgcgggaacagatcagtgactatgaagagctttctactttgcagcagcgatttgtatccgatgtttcccacgaactgcgcacccctctagctaccatccggatggcggcagatttaatctacgatgaacgtgaccagctttcggaaactaatgcccgttccgctacgattttgcatcgccaagttgatcgctttgacaagatgctggcggatctcatcgaaatttctcggatagatgcctccgttgcgcaactttcgctgtcggaagtcgatatcgcctcactggtagcaggggtggtggaatcaaataaggcactggcagaaagcctgggggtggaagttaaattggaaacttttggcgacaccgtagcggaagttgattccacccgcattacccggattgcccaaaacctagtggtaaacgcgattgagttcgccgaaagtaagccggtacagattagcgtggccggttcagccacggcagtggccttccaagtgcgcgattacggcccaggaatgacggatatggtagcccaacacgttttcgaccggttttaccgcgcggatccctcccgcaaacgcactaccgggggtacgggattgggattggcaatatctgccgaggatgcagcgctgcactccgggttgctcacggttttgtcctgcccccaccagggatccgcctttaccttgctattgccccgccaccagggagaggaaatcgatgacatcccggtgcaggtagaaaatcaggatctggtcgctgcccgccagctgtgggcgaatgagcatcccgaggatattattttatcggagaacttagaggaatcatctttgcaggtgcatcaagttcgcaccgatgttcccttaggggacgagccaataattggggatgaagtgttgccgcgaatgccagctgatttacctccagatattttagaggcgaccccggcgcatcccttgccacgcctgcccgaaaatgacagcgttattgacatccaaggacgaattaagaatctggagtctcccggaacagaaataccagataacgacgctcaaggagaaacctcatgagctggatagctggccagttcaataaactggagataggaaaggcaagggcggagaaaaatcagttaaatgcgccctccggacagttagaatctcccgccagaaccaaaaagattaatcctgtaaagcgtatttttctgggaatattggcattttttaccgcctctgtgctcgcggcttgtgcagcgctacctgattccgggccggttcataaaggtgaggtaaacgttgattctcgaaacccattgtcgcagttagccagtggcccagtggatggttccactcccgaaaaattgctggcggattttcaacaagcctgcgctgccggtacctacgatgaatatgggattgcccgccaatttttaactacctcgcagcggaggcactggaagcctcaggaggaagttacggtgcttaaccccaagacggaactgaagataggttttgactcggaaacaaatagggctaccgggactggtcagccaagtttgcgtcttaataaagcaggaatcagtcaaaaattccgtacggaagaaaccgtcagatattccttagccaaggaaaatgggcagtggcggattagctcccttccggatggggtagtgctgaccaactcggcttttaagaatgcttttgcaaaacgcaatgtgtatttctggtctagtgatcatcgctttttggttcctgacccccggtgggttccccgtaaaaatggtgctcagaatcttctggaatctctatttttcggccctagcgatgatctttccccagcggttagctctccggcaataatgaagaaaattccttctagcctggtcgttttacaaaataaaaaggcgagagtagagctgccggacaccgtccatttacgttctcagctggaagtggatcaactttatcaacagttgcgtgccactttgctggatgtgtcgggtattgatgaagtggtgctctcgcaaaatggttcatcgctcgcaggttctaatgagcagtcggcggcttcgcctaaacctgtcatgctcggggtgaaaaatggtgaggtagttgaggaatcggagtcacgcaacggcgtatttactgcgcagacaaatggagattacgatatcacctggccgactcccagcaatcccactactgatttccacgtcgcaatccgtggtggaaatgagctggtgcgcctgcagcgagggaaagcaccggtggtgctgtatcggggaaataatttgcgtgccccgcaggtagatgcctggggctgggctttcaccggcgattcaactcaagaaggggctttggtagcggttaacgctcgaggggcaactgtagaattaaaactccctactgattccaattggaaaatcccgtttttcgctttgagttcccccggggtgcgcggactagtggtgtggcaggtaggttacagtttccaggcacaattggtgacgctagtacgcggggaagatggtactcctcggcagattatccctgctcaagataaaaccgaggttatgcgggatgtgatttcggctgcttgggtaaatccaggacaggtggcggttttgcaaggaggcagttccccgaaggttcaggttttcggggttaattcctacgacgaatcttttgatgctcccgtaaatgccgaatatctggtgccgaatcctcctgatggcaatgtagaagtagtcagtgatcgcggttcgcgtttggggcatatcgagcagtcttggcgggtactcggctctgatattttctatcccgcttattcttcctaataattaggtatttggagtcgctgggggttacatcgattaagctttgtacccaaagataaatatttaaacttttcccccggtaattattttttaggacgtagatggaggtttttgggacaaactctagctatgggtgcccacgctttatcctcaaactcctcggtattttcggcgttagtcagtgcccccgtggctaaatctctccgagccttctccaccatgctttttcctgaaacttgccccggctgtgggcagttagacaccaggctctgtgaccgctgtcgaggagtgtttttacgtcctcctaccagcgttaatgccgctatgtctgtggacgtaaaccaagtgtggacactgagcctctaccaggggcaagcgcgcagagtagtgttggcgatgaaacattctcgatcctactactaccagcaacttcccttcttttttggagcggtcgccggcaaggcactcgctagttatctttcccgcgccctcctagtatgtcccgcgccctctaccttccggataggtaaaactcccatatcctctaccgccggcaagctggccgccggaatagcagcagggctgatatctcaggggctggatgtgcgtctttccggattactacagttaaaacccggcaccaagaagcaagcaggacgtagcttccaggagcggctacgaggtcgcgccggcagtatgcagctaggaacggcaaaagatttggattttagtggagaagtgctgctggttgatgacgttatcactaccggtgccaccatccgggaagcagttcgggtaataaatgaggcacaagcacaggtaaaggcggtgttctcgctcagcatagccgaacgcaacctcaaaaggggttaatgatagggcattttgaggtagaatttttgttacttgaaaagcccaaaggtgggcgagagggggtggtagctgcaatcaccgcgaccggaatgagccggtacgcataaacctgggatctttgatccccataccgtgccctggaggacactaatggaaattatcgttgaagcacgaaacgccgaaatccaccccaatttccgccaatatgccgaggagaaagtcgctaaggttgaacagttttatccgcgagttcagcgggtaaatgtggagctcactcacgaaccgaaccagcggcaagcagacacctccgagaaagtggaactgacagttttcggtaagggaccgattattcgcgccgaggccagttcctctgaccgttacgcctcagtagatattgcttgtggaaagctctatgagcgtctgcgtcgcgcccgggatcgagccaaagatcaccgccggcaccgagattcacaccgccacgaagagcctttaaaaatcgaggaacttaatttgagggatgccgcgaaggcagttactcccgaagatgacgagtattctcctgatattcctcgggaacgaaaaatcgggatagcggatgaaagccagttgggagactccccggtgattgtgcggcaaaagctgcatgaggcatcggtgatgaccgttagcgaggcgctataccaaatggaattggtgggccatccgttctttgtgtttatcgattccgaaaccatgcaaccttgcgcggtgtatcaccgccgcggctggacatacggggtgattcgcctagatgctacggcaactccccgggaaagctaaacaccaaaagagggattaaaacctgaaaatatgtggaggggggagccttagatgaaagtcaaaggctcccccctttagctaacgcatttggaaatcgtgttgttcatcgttccagccggttttttccaatagacctggctgggcggtgtcccggtcgattctccaacccggatcggtaatcatccgagaaatcgccaagcctacgccgatagaaagaatcacaaagaatacctggactaaagcggcagtagcttgcggaatttcaccgttcgaaagatgggtaatcgccgcatagaggggaactccgggaatcatgatgactacggccggaaccgtcagagaagtgcgtgagaaacggaaatcgctgagccgagaaataaaatgcgccacgatcccgatagtaagtgccgccagacctactgctgcctgcggcagcattccttgggctactaggaaaagccgtcccacattgacgcagcctgcaactagagcagcgcatagcgccacttgggggcgaatagaaaatagtaccgcgaagccgaatgaagccaccagtgaacaaataaattgcagcaggtagagaccagctccgctaactgggaactccgtgggcgggtcaatatgccattgaaataaagtggcgatcatccacaccgaaatccctgccgatataaccagcatcacgacgtaggtcatgcgagacatcccggctaagaaatccattcttaccaggtctaatatcgcggttaccagcgggaatcccggcactaagaacagtacagcggaaatgattccctgggggtgaccgacggttaccaatcccgcgagcaacagagcttgggtgattcccatatagagcagagaagctaaaagtccacagagcatccacaccccaaaatgattggctttgcgttttaacaaaaagcggcgcaaaatctgtccgcacagcgcggcaatccctactacgctgcattcgaccaccccgccccggttcaaaaagcagaatcccgcgcaggcaataccggatgccaggcagttgattaccgccggatagggcggtttgcgggcgataatttcatcgagactgcgctcggcgtcctcaaccagtaaacctggttttagagagcgtacaaagacccgtaaatcatctagacgggccgcattagtaccaaaggcgcgctgctcatgagactcggtacgaaaagttccatgcgcataaaccgaggtaactatctcggaaaacgtaacttgggaatgctgagcctcgatcccgatggcgttagccagtctggccatcgaaaatttgaccatataggcgctggcacctgcagccagcagggtgcgtcccaggcgagttaccaccccagattgcgccgctaggcggtcacgtaaaacgcgtagctgttcgtgttcgctaccgtgcggattaaggatgtcgcccttagattgtccgtcacttagcgaaggtggcacataatcagagtcagagctgctggcgaaaaaactatcatcggtaggtgaaggtgtcataaaagaattatccaccctattggtgaccttgcccaggacgaaggggtaaaacggccgcgatttttattacactgcgtcacctatttaaggggaacaaagccttctatcccgcctgcagaattacagacccccgaggatttgtgcgattaggatttttccgaccatcgctaaggggtagacgagggaatatcccaacgctactcggggatcaaagttggtgcggttattggcataggcgaggacggccggctgggtttgggcacccgccagcagaccagacaggcgggttccacccatcttgaagccgtagcgcatcacgaaatacagtcccaaaccaacggtgagagtcaccgccattcccaccagtaaaatccctagccaggcaccggaagtaaacgctttttcgatctggctgccggcgttgtatcccgcctgtgccaagaagattaatagacctagttccgaaagtacctggcaagcggtgtaaggcagagtcgtggggaacgggccaatgcgtccaacctttccgaagattagtcctaccagcaaggtgccggctgccgaaccaatcgtgaagtattccccagtgggtgtgaggatggggaactcaccaatcaaaagaccgaggaccataccaaccccgagagctacggggttaatcgaggttaaaccggtggaggagtcaccaaagtatttcgaaagttccttcaagtgcttggtgggggcaactacccgcacccggtctcccagctgtaacaccaggtcggggcgtcctagcatgtcggtgtcgccgcggcgtacccgagaaacggtagcctggtaacgttcctccaagccgagctcgcccagggtgcgaccagaaagtttggggtcagaaatagtgattcggcgatagtcccaatcggtgcgatcggcagaaagcgaaatagaggagccatgccccagttcggaaactacctctaccactaggttttgcgggccaaccacggtgactagggaacctttatccagtttggtgtcggcagtaggacgcacgattggtccgtcctcggtcttgcggagccgggaaaaacggacgtttccgtctacgtgggcgcgaatatcgcgcaccgagggcaggtcatcgcgttccacccgcaccgtgcgggaaactagtgcaaccgggcggtctttatcgttcttgccgtagttgagcgctagggtagccacgattagcatcccgaaaaccccaaagaggtaggagatcgagtaggcgacagttgccgcttgttcattacccgcggctgctcccgctgctgccagggcgggagtgttagtgatggcgccggcgaaagtgccgccgatagtggctatatccatcccggcaagcttgccgagtacgtaggcgactacaccccctccggcaagaaccgcaaaggtcgccgccataatccccagagatttctttagggaggcgaagaaagagtttccggagtttatcccgatagcgaaggcgaagagggcgagccccagtttgccgaaagcgtgcgggaaatctgcgaccatgtctacgcccgtggaagtaccccaggcggagatgccaatagctaggaagagtacggcggctgcccccagaccgattcccttaatacggaaatgtcccaggtacatgccgatgccgatcaatccgaaaagtacgagtacaggttgtgctgccagatattggaagactgtctgcacggtgcctccttaaaaaagcctcaagactaactccatactgtcacactgcttattggcactctcagaccaaagtccatttagcggtgaaaatagcgaggaatttgtcaccatttcattccggttcggttttcctagccgaaactaaagcagagcaaaatatcagtatctgagatgggtctgcccgaaatggcgatgccgcgtagcgtgaagcttgttatgacgaaacgaattattgagctagtcgccctagtactgctggtaccggggagggctaaacgcgtctaaaatcgtttcgagacgtagcaagccctaggtaaacacacctggggcttttttatttatgaaaatcgaggaaacatctaccagaacggggataacgatgagtaacaaggagcagtcaccaggcacggcacctcctcccaaaaggatgagtggggctcgggcagtggtcgctaccctggagcacctgggggtgaccgatgtgttcggtttacccggcggggcaatcatgccggtcttcgatgcactctatgactcgccgatcaaccagatcctcgtgcgtcacgaacaagccgcgggacatgcggcggaaggttacgcactttcaagcgggaaaactggagtggcaatagtaacttcgggaccgggggcaaccaacctgatgaccgccctcgccgatgcgcatatggattcggtgccactggtggcgatttccggacaggtatctgccaatgcaatcggtactgacgctttccaggaatccgatgtggtaggggtgtccatgccgattaccaaacacaatttcttggtaaccgacgccgcagagattcctactaccttggcgaaggccttccatttggcctctaccgggcgcaaaggaccggttctggtggatatcgccaagaatgcccaaaatggtgaagtcgatttttcttggccggtgaaagtggatttacccggctataaagtgccgagcaaaccccataccaagcaattaaaagcggctgccaaactgatggcgcaggcagaacgccccattctctatgtaggcggtggggctcttgcggcggaggcgaccgaggagctgcggcaactggtagaaataaccgattttccggtggtgcttaccttgaccgcacaaggcgcgttcccgtcctcggatccccactgcctgggaatgccaggaatgcatggctcggtgccagcagtgaccgcgttgcaacgcgccgatgtgatggtggcgctaggaacgcgttttgatgaccgggtaactggccgtcttgatgctttcgctcccgatgccaaagtgattcacgccgatattgaccccgcggaaatctcgaagaaccgagtggcggacataccaatcgtgggagatctacggcagaccctacagggactactgccgaaagttaaagaggaaatgcagcgtaacccgcgtgacatttccggttggaagcaccatttggattacatctgtgagcgttacccgcttgcctatgatgaacctgatgacggtctgctccctgcccaatatgtggttaaacgtatcggggaaatggcaggtaaggacgcgatttattgcactggcgtgggtcaacaccagatgtggtcgcagcaattcttgccgcacgaaaacccacggggattcctcacttctgccggcctgggcaccatgggggtagcgattcccgaggcgatcggggcacaagtagctaaccccaaggctcaagtctgggcgattgacggggacggttgtttccagatgaccaatcaagagctcgcggtcgccaccttagagaagctaccgatcaaagtagcgattgttaacaactcggtactgggcatggtgcatcagtggcaagaaatgttctttgacgcgcgtttttctaacaccctgttgcatgacggtgaaggtggtcgggatattcccgactttgtgaaactggcggaagcctatggagccctggggttgcgtgctcgcactaaagaacaggttgaccaagtaattgcgcaggcgatggaaaccaacgatcgtccggtagtgatcgactttcgagtctctaccgattctcaagtctggccaatggtaccggcgggggattctaacagcaacgttatctacgcagccgggcagggtccggtctgggaaagtgaggactgatcgtgataggcaatcgtcacaccctttccattttggtggaaaatcgtcccggcgtcctcgtgcgggtagcggctttgtttaccaggagagctttcaacattcattccctggcggtaggggaaaccgaagaaacttcgatttcccgaataactgttcaggtagatgcggaagatttgccttttgagcaggtaactaaacagttaaataaactggtaaacgtgttgaaagtggtagagctccaccctcaggactcagttacccgcaagtttgtgctttttaaagtacaagctaacgcggaaaaccgttctcaggtgctacagatcgtggatttgttccgcgcttcggtagtagatgtacaccgcgaatccctggtgattcaagctgccggggtgcaatcaaaactggaggcactgatggagacgttagagccttatggaatcaacgaaatcgtgcaatcgggtgcggtcgccattggccgtggcccccgttcaatcacagatcaattaaaggagaagtaacaatggctgaaatcttttacgacactgacgcggatatggccgcactttcgggcaagaaggttgccattatcggttacggctcgcaaggtcacgcccacgctctgaacctgcgcgatagcggggttgaggtagtcgtggggctacgggaaggctcgtcctcggtagctaaagctaaagagcagggcctagaggtcaaatcgattgagcaggctacctccgagggagatatcgtggtagttcttgctcctgaccaggtgcaacgtatggtatacgccgaaaaaattgctccgaatctgaaaccggatgccgcgattttctttgcccatggttttaacatccgtttcggttatattcagccgggcgccggtcacgacgtgtgcatggtggcgcctaaaggccccggtcacaaggtacgcgcttcctatgaggcgggatatggcaccccggcagtaatcgcggtggaacaggatgaaaccggcaacgcctggcaggtaaccaaagcttatgcgaaagccctgggggctactcgcgcaggggttattaagactacctttaccgaggaaaccgaaaccgatcttttcggcgaacaggcagtactttgcggcggggtatcacacctgattcaagcaggttttgatactttgaccgaggctggttatcaaccggagatcgcctatttcgaggtttgccacgagatgaaacagatcgtggatttgatcaacgagggcggaattaccaagcagcgctggtcgtgttcagacactgccgaatacggcgattacgtatccggtccgcgcgtgattaccgaacaaactcgcgaggctatgcgcggcattttgtccgatattcgcgatggttctttcgccaggcgtttcatcaatgatcaagacaacggagctcaggagttcaaacagatgcgtgcagcagaagaagcccaccccatcgagaaagttgggcgcgaactgcgtgccatgttctcgtggaatcaaactgacgatgactaccaggaagggcacgcccagcgctaagggcgataactacggaaatagttgcggttcgcagtgctgacctgtgaaaagcgctcgggggaccccggtgagccttgcttcgctcggctcaagccccctctcgcatcttttcacaggccagcgtcaacgttgtcgatatttatttcaaagcgacgaagtcactgcagtcgcagtcaggtctattatccacccaggtagcgggagaaaaggacaataacaagtatggaaaaaaccattaaactcgcggttattcccggggacgggattggcaaagaggtagtggccgaaggcctaaaggtcatggacgctgccttggcaggtagcggggtcagcgtacaaaaaaccgagttcaacctgggggctgctcgctaccgggaaaccggggagatcctgccggaggccgagctggaaagcattaagaaccacgacgtgattttgttgggggcagtaggtgatccctcggttccctccggagtgctagagcgaggcctactactcaagctgcgttttagcctggatcactacgtgaatctgcgccccgcccactactaccggggagttcctactccgttggcgaatcccggcgagattgatttcgtggtagtgcgggaaggcaccgaaggcttgtactgcggtaacggcggggcgattcgggtgggtaccgaccaagaaatcgctactgaagtttccgtcaacaccgcttttggagtcgagcgggtggtgcgctttgcgtttgcgcaggctgtcaagcgacgccggcatgtaactttggtgcataagcacaatgtgctggtcaacgccggacatctgtggcggcgcctagtggagcgggtcgcggaagaatacccggaggtgacttgggattatgcgcacgtagatgccgccactatctacctggtgcaagacccgcagcgtttcgacgtgatcgtcactgacaacctgtttggcgatattttgactgatgaagcaggagcgatcaccggggggattgggctggcggcctcaggaaatatcaacccagatcgtaccttcccctccatgtttgagccggtacacggctcggcacccgatatcgcggggaagggaatcgctgatcccacagccacgatttcttcggtagcgatgctgctagaaaacgagggcgtgacgcaagcagcggaaaatatccgcgctgcagtcaccgccgatatggaggagcgtgccctcgccgccgagaacggtgaaccgctgaggcgcagcaccagccagatcggggacgcgattgctgcccgcctctaggagaaacggataatcgctcctactagcaagaaaagtaaatacgtggccacccagtgaccgagaaacagagtttaggaaaaaataggctcccaggagccggaaagaacacaatcatgagcgagaatggtttaacccatgtgccaactaagttagaggcggcatcgcaggttccgctgccgagcgcggatgaattggcgggacgctttactttgcagcctaaccagcatccagccagtgaggaagaataccgcgcgattatggattccttgtcttttggcagaaagttcggtgaccatatggcgggcgctgactggaaagccggtgaagggtggagcggacaccgcgtgcaagccttcgaaaacttgagcctgtctccaggagccgtagtctttcattacggtcaagaagtttttgaaggcttaaaagcctatcgccataaagacggctctatctgggctttccgtcctcgctacaatgctgcccgtctgaacgcgtctgcgcgccgtctagccctaccggaaatcccggaagaggactttgtggcttcggtagtagacctggtacgtgccgataaacgttgggtgccgactgcccccaacacttccctctatgttcgtcccttcctaatcggaactgagccctacctgggggtacactccgccagtgaagcgaaatatgtggtgattggatctccatctggctcctatttctcaggtggggaagccaaaggagtctccatctgggttgaccgccactaccaccgggcaggtccaggcggaaccggagaagctaaatgcggaggtaactatgcggcctcgctactaccccaaaatatggcggccgagaagggttatgagcaggtctgtttcttggataccacccataccaacctggaagaactggggggtatgaacgtgttcgtggtgcggggggatggttcggtacataccccgcgtctaaccggcgtaatcctggagggcggtactcgctcggcgatctgccgcctgctgcgcgataacggcaccccggtgttcgaacgcgatatttccctagagtcgctggtagcggatattcgctcgggcgaagtgagcgaagtattcgcctgtggaaccgccgcggtagtaacccccatcgggcggctaggctccgatgatttcgaggtggaagtaccttgcgggccggtcaccgccagtatccataaacgcctggtagacatccaaaacggggaagcgcccgatccctacggttggacttatcacctttgtgactagcggcgctgaggacgcgggcggaaaaatctgcagcgctcgcgtttagggcgcagaccgggattctggtttgcgccttcattctcgtaaccgcaccccgcaaccacagacaattaatgttgggagagaaaatggcttatccacttcgttcaagaacttcaactgccggtcgcaatatggcaggcgcgcgctcgctgtggcgggcaaccggcatgagtgatagtgattttgggaaaccgattattgccattgccaactccttcacccagtttgtgcctggtcacgtacacctcaaccaggtgtcgccgctggtagcggaggctattaaagatgcgggtggggtggcgaaagagtttaacactatcgccattgatgacgggatcgccatggggcatcaggggatgctctactctttgcccagccgggaaatcatcgctgacagcgtggaatatatggtgaatgcccattgtgcggacgccttggtttgtatctctaactgcgacaaaatcactccgggaatgctgattgccgctatgcgcctgaacattcctacggtgtttgtgtctggcggtcccatggaggccgggcgcggcatcgaccccgaaatgattgtggggccatcccaaagcgggcacggcaatctgattacggtaatgaatgctaccgctgaccaggatatttctgatcagcagctgaccgagattgaaaaagcggtctgccccacctgcggttcttgttcgggaatgttcaccgctaactccatgaattgcttaaccgaggcgctcggattggctctgcccggaaatggttccactctggcaactcacgttgcgcggcgcgaactatttacccaggcaggcaaactaatcgtgcagctgtgtcagcgctactatgaccaggaggaagacgcggttttgccgcggcaaatcgcttcgcgcgaggcattcctgaacgccatgagcctagatatggcgatgggaggttcctcaaatacggtgctacatctgctggcgattgcccgggaggcgggggtgcgttttgacctggaagatatttcgagtctggggcgtagcgtgccttgtctgtgtaaggcggctcctaaccacaacgattaccatatggaggacgtgcatcgcgccggcgggattccggcattgctgggagaacttgaccgcgctgggctactaaaccgtgaggtctcttcgatccatgctccctcgctagaaaaatggctgtccgattgggacgtacgcggcgggtccgctaccgagcaagctgagcaattgtttaaggctgcgcccggaggagtgcgtaccaccgagccgttctccactgctaaccggtggaaagacctggataccgatgcgaccagcggttgtatccgcgatactgcccacgcctactcggcaaacgggggattgacggttttgcgggggaatctggcagaaaaaggcgccattattaaagctgccggaatcgacagcgacctttaccatttccgcggtaaagccattgtgatggaatcccaagaagaggccatcgaaaaaattctagaccacagcgtcaagcctggtcacgtagtagtgattcgctacgaagggcccgcgggcgggccgggaatgcaagaaatgctctacccgacctctttccttaaagggcggggcctggggaagaagtgcgccctcattaccgatggacgtttttccgggggcacttccgggatctcggtggggcatatttctcccgaggccgccgatggggggttgattgccttgatcgaggacggagatgaaatcactatcgatgtcaacgctgaatccctaaccctagaggttcccgaggcggaactgaatcgtcgccgcgaacagatggaacagcgtccccatccttacactccgcgcagccgcaaacgcacagtgtccgacgccttgaaactctatgctgcctgcgccttaagtgccgaccaaggtggcgcccgcgatgtatcccgcgtcaccgggtaataatctccgcgcctagtcagggtagggcgcagatccgggctggccgcaaaaagcactcgggggaccccggtgagccttgcaaaagttaagacaagggcaaaattggaatctatctaaagggaaacgtatccgattcaaaagttaatgattggtagcgtgtcccctcgagtatctttttgccaaccagccctggtgtcggcgagctacttacgtgctaggtcgttggtgttttcggtgccgcggaacactacccacttccaccaggcgaactcgccaatgaagttcagcaccatggttacgcccttgacaatgaaatcattgatgccggcgttggcggctagcgcccctagccacatagtgatggggataaagaaggcgtagaaaaccgcgacttttagcatcgcgattggtacattattagcggatttgaaggtgtaacgccggttgagggtgaagttgtagattaccgaaagcgtgatggaaataaagtgcgtccaggcatagggcaggggagtcagccattctaaaagtgagaagctggcggcctccactactccggcggagatggacagcaaagtgaactttaaggcctggatggcggcgtctttacctttagcggcctcgccgggaagggttggttttgctagcgctgcgggttcgccctctgcgtccgaggggagttttccttccgcggtcatcgaatcgcctccaattgcgcgaaaattttcttatttgccggataaatgtctttgaaagccgcgaacatttggtcgtagcggtctttatgttcaggattcggctcgtaggaggcagtaaccggaaccaaggaagaagccttagctaacgaaggtatttcccctagtcctgctgcaattactaaagctgctcccacggctcctacatcttgcggattggctactgtgtctaccggtttgccggtaatgtcggcaagaatctggcaggtaactgggctaagggcgccgccgcctacgaatcgtagccgaggagcggtctcgaccttcttttcttgcgtttccaggaaccagcgcacgtggtagcacacgccctcgactactgcgcgcagcagttcagttttcccggtttctaatccgatcccgataaaagcgccgcgagcgttggggtcttcaaaggggcagcgattgccgtgcaaccagggcgcaaatagcactccaccggctccggcgggtgcggagtcaattactttcgacatgtattcgtagagggaatggaactcggattcggggtcctccgccacatctttctggtccaggtaaatatggatttcgtcttttgccagatggtcgcggacccactcgaggcattttccggcagtttccatttccgcgaaatagttgtaatttccactgatggcacccactaccgtggcaatcatggcagaggtgtcgatagtaatcttgtcggttacggtctccacccagccggaagttcccatatatacatgggtatcgcccttcccagcggcaccggcgcctaccggaatcagggaggcgtcccctcctcctgaaaagaccggtattcccgctttcaggccaagctcgcgggcttgctgaggacgcaaagagcccacaatatcggtcgaagccacaatcggtggcatcaaagctgggtctacctgcatcatctttagcatggcggggctgaagcgcttttcttttgagcgaatatcgtaaagcagggtagagaaggcgctatcttcactcatattaaattcgccggtcatccgggcaatgatcgcatctttaacatcaagccatttgtgggctttggatagttcctccggtcgattttctttcatccaatggtatttccagaccgggtctttcaccgaggcagaaaccgcgccggtatggtagagactgcgcaacagtttcaccaggttgatccccgcgatccggggagcctgaccggcgattttccgcagctgaacgccgccacgctgatccatataggacatcgagggatgtaccgggcgggcatttttatctagcaaaaccagggactgcatctgggagcagaagctgattcctttgatttgtgctagttccgcctctgcctgggcttttatttgggcggtagcgctggccatagcctgccaccagtcatccgggttttgctcgatgccgcccccggcaactacttgtaggccgtagccttcgctggcgctagccagggggcgaatctggtcactgacctcaaataaacaggttttaacgccggtagttcccacgtcataggttaagcaatacactgctacctcttttctaggactgaccagaggatttctgtcatctgttcggcaaactcgctgggtgccgccacttggtaaagctgggagcgtcctttgaaataaggagtagacagggaatactgcatcatcaccatcgcgttatccacggtgaaggcgaggacttctgcaggcaaatcggtgcggatatccccttgttgttgtccctgcttgatcagttcaaccagtcccgcggcggcataactttccaattcacgggcgatatcaacgataaaatcctgattcccggtagcggtaatttcatggtaaagctgctggtattcggggtatagttcgcaggagtttacggttagcagcatcagtttatggattttttcccgcccgctgatttcctcttttaatatcgcgccgatatcggtttcgataatcccggcccctaaatgaatcacatatcggaataggttttccttagttttaaagtattgaaacagtgacccgactgagatttcggcggctttcgcaatccggttggtgtttgccgcctcataacctttttccgcaaactcgctgactgcggcatcaataatccgctgtgctttttccgaatctaactggcggaaccgctgcgttgcccattccatgttgattgcctcttgtcgaatagctcttatcggtgagtgacacctcactcgcatggcgcgatagtagcacgtctgggcgtcctctaagtacaatttcggtatttacgcagggaaatcggggatattttcttaccaaagccccctgtcatcgcagagtaaaacggttttgggtagggagagcaagggtgggaaccattgacagaatcgcccctaaagattaacctaggtcacattgctgtgagtaagcgctcacacggtccaatgggggtcaaaatggatattaatcgtcccggagcgcggcaggtaacgcgcgagctagatgaactaattaagcagccaatttactcgatttctccttccgctttacgcgaatatgaggacgaatattttggaaaaaaatgcaccaagtcgcggcagatgatccgagaagcgcaagaggtaatcccgggcggggtgcagcataacttggcatttaaccatcccttccccttggtgttcaccgccgctaatggcaataaactgacggatctggacggtaacgaatacctggacttcctgcaggcgggcggaccgacagtcctggggtcgaacccgccgcaggtgcgggaaaaagttattgacctgctcaatacttgcggtccttccaccgggcttttccatgaatacgagtaccgtctgggcgccttggtacgcgacctgattccctcagtcgatatgtttagggcgtttgggtcaggaactgaagcctgtatggcctccatccgagtggcgcgcctggctactaagcatcgccacgtcctaaaaatgggcggcgcctatcatggctggtcagaccagctcgcctatgggattcggattccgggatcaaagtttacccaggccagcggaattccgttacgttgtatgtcgctgactgacgagttcttccccggcgacttggacgatctggaacgcaaactgaaacacaagaaacttaccgggggtaccgccgcgattatgatcgagcccatcgggccggaatccggtactcgcccgattacccaagaatttttacgaggggcgagggcgttggccaataaatacggagcactacttatctttgacgaggtcgtgaccgccttccggatttccgaacatggggcccaaggctacttcggagtaatgcctgacctgaccgtattcggtaaagtgatcgccggtggctacccctccgctgggggactgggaggacgcaaagaatatatgcgctacctggcggccggtatccaaaccggagataaagtaaagaaagcgctggtcgggggaaccatgaccgcgaatccgctgtcctcgctagccggttactataccattaaagagattgtggagacctcggcctgtgaccgggctgccaagatgggggatcgcttaaccgatgggctgcgcgccctcattaagcagtaccgcctgccgtttgtggcgttcaaccagcgcagcgtatgccacctagagaccgtggggactatgcactttgcgatcaactggaagaagccctggcagattccgcacgttttgaaagccaccagtgagcgtaagaaagaaatggaacatatgggcgcggcctatatggcggaagggatcgtgactttggcgggttcccggctatatacctccgctgcttataacgaagaagatatcgaccaggcgcttgccgcctttgagcgggtattccaaaaggtggtaaagctgtgaactgcgatgaagataccaaacgcgcaaaattagttgagctgtcccatcagctactctccgacgggttagtggtgcgcacctggggtaacttttcggtacgaggcagcgcggacgactttttgattactccctcggggcgccgctacgaaaccatgaccgcggaggaactggctttatgcaccggtcctaaggaatggtccggcctctataagccttcctccgagtatccgatgcacgccctcacctatcggttatttccgcaggcgcggtgggtgatccatactcaccagccctatgcgtcagctttgtcgctggcgaaaaaggatttcgcgttggatgacgaagcgcaggctgagttggggcaagaggtgttgccggtggctccctacgggttgccctcgaccaagaagctgcaccgcggggtggagaaaactttacagcgcaccggggcgcaagtgattttgatgaaagctcatggtgccatgatttgggcagaaagcgccgaccaagcacggcggctcgcaaatgctttagaaaaggtggcaaaagatttgtatcagcgggagctttcctgtttgccgcctttgccggcacgctcgcttacttctcagcgtgagggggagggggatgctctggtctgggttgatgaacacggccgccccaccacgcccgatgcggcgacgcaaacgaatcacttgcggatctatcgggagcgcccggatgtcggcgccattatcacctgccaccacgcgcaggtagcggacttttttggaggaaaactgcctgcctacttggacgattttgcgcagattattggactgaaagctgatgacaccacacgcggtaacgcggtactgaccaatagcgcggcctactgcatcggggccgatctggatgctgctcacagcgctcagatagtgctggaaaaaaatgcgctggcggcgcgctatgcccgagtttgcggggcgaagcctctaaagaaagcggaggcgctgttaatgcgggaaatctatcggcgaaagtactctaaacaagctggttaatcgcaaaataatagggagcccggtaggaagtaggtgctcgcaaggagaagggaacagtctatgggcagcgcgcaagagcaagctattaggcttgcggttgagacggctcgtacctgttttaaccggggaagtactatcccgatagccgggcggcgaaaaaatctagctgccctgttacgggagatagaaaattcgcaagcagatatttatcgcgccctcaagcaagatttaaataagagtcgcgccgaagcatatatgagcgagatctccctggtaaaggcagaaataaaacatttacgtcgccgcctaccctggctggctctgcctcgcccgaaactgccggcactttcccagctgcccgggtgtttacaggtgcggcgcgaaccctacggggtggtattggtgatgagcccgtggaattatccgttccagctcacgatggaacccattgccgctgctatagccgggggaaatacggtggtagtcaagccctctgcctacacacctcataccagtgccgtgattgaaaaaattttgcggcgcgccctcccgcccgggatggcgagtgttatccatggtggccgcgccgaaaacactgccctgttagagcagcgctttgaccatattttctttactggctccccggcggtgggacgcgtggtaatggaagcggcctctcgacacctgaccccggtaactttggagctgggcggcaaatctccctgttttgtggatcgcactgccaatattgaaaagactgcgcgcaggattctgtttgggaaactgcttaacgctgggcaaacctgtgtaagtattgactatgtttatgtgcacgaggacgtgcgtgcgcagttaattgcggctttgcaggcgggcatctcccgggctttacctagtgagcactaccgaaaatcttcgttcgtaaagattatttctcctaaacatttttcccgactgtcggggctgctcgcggagcaaacccttttgggacctgatggggaaggcctcgtagaagattttcttgacccgcaaacccagcagatcaagccggtaatcgtggataatctttcttgggattccccacttatggctgaagagatttttggtccgattttgccggttcttcccttcacagatttggaaacaactttggttgcctacgaggagcgggaacatccgcttgcactttatatttttacgaaagatcgcaggtttgcccggcaggttatgggcaaagtcaacgccgggggagtctgtattaacgacacattgctgcatatgagctcttcaaaggcaccttttgggggtgtaggtaactctgggatgggaaattatcacggagactggtcgtttaaagccatgacccgggagcaaacggttctccgtaaatcttggctttttgatattccggtgcgccaccacccctatggagagaggtctttgaaactcctgcacaccctgttgcgctagcgctcagggggttgcaccggataggagagatctaacctcccacccctgcagcagatggtgaagtattagggaagtggccgcgtagctctatagggtaacttcccggagtcctccattcttgacgtccaagacaaagccgcgaaccgtaccgcccacgaagggactgtcaagcagattcttcataccggctttaaccgattcgtccacgtctttgaaccctccgggtctccaatcgggacgctgcccggtttctttttcgatttgtgcgaggaattcttcgtcatcggtcctagacatgccgcaatctgtgtgttgaatcagcatcacgtactgagttcctaagctgcgctgtgaagcagtgagggtgcggatggtatccggagttaccaaaccaccggcattgcgaattacgtggatttgcccaggctttactcctaacatggtttccacgtcgatccgacaatccatacaggtgatgaccgctactttcaattccggtaggtggggggcttcccctggaaactttgcggcgtaggcagcttcattttccagtaacttatcaatcggatccatgagttctccttctttatgtggttagttaaatcgtaataaatctgtctcgatgacgctgaagtaaccaagttatttttcttgagcgcaatcccacagctttatggtttgcaaatttggaggtgacccgcttaggcttttgagagtacctaggggctatggcgcagttggtagcgcgtctcgttcgcaatgagaaggtcaggggttcgaatccccttagctccactaaccgccccgaccaactccgcgttggtcggggctttttcttattttaacctccctaacctgcactgatagcccgctggcagagtggaaaccgaaaggcacggacggacaaagaaagacaaaaaaggactaaagcgggtagaatctagtggtacttaagtggtaatcgagtgggactcgttttggtggtgatgatcttgagcaagcggcgtggctttggttcggtaaagactcgggagcttaaatcgggcgcgcgttcgtatctcgcgtcatttattaatccggatacgggtaaaagagtttcgcgctctttccgctcgaagatggaagcgaacgcttggttaggggagaggcgccgcgatatccgctctggggagttccgctccccagaggaacgtcaagaggtggttactttcgcttacgctacccaagaacacttacagcgtctaaagaccgctggacgtaaaggctctaccctctacacctattcttcgaagctgcgctaccccctggaaaaactaggagagaaggatctgggggagctttcctgtagcgatattgaagcctattgcctacagacatctaaggatttaaagccgggcgcggctgctaatgccttgaacgtaacccgcgcggtgctgcgatgggcagcaaaacgcggatacatggacgcttcgcagctgaaccgggttacctggccagtattcgaaccggtaaaagacccagagcgccgccaggtagcaacccccgaggaagttaaggggatggctgcggctatgcctgaccgtctacgcctagcagtcctactgggcgcctggtgttctatgcgcatgggggaggtttgcggcctgcagcgcggcgattttactaacctagataacccgcccctggcaacggtacgtattgttcggcagactaattcgaaaatgggcggggcttacaccgacttgaaaacgaaggcggggcgccgtgagatatccatcccgcccgccctcgtaccagtgataaagcaacacctgtctacttgggtaggcaacgctcccacggctcccgtattccccagaactaccgacccagctaagccggtacatcacaacacggttcgtagcgcattcgagcacgctcgcgaacaactcgcaatggaatggttcgtgtttcacgatctgcgccataccggtctaacgactttcgctcagcagggcgctacgctcgcggaactgttagagaggggcgggcatgtggatgtcgaggttgctctgcattatcagcacgcgactatcgagcgggacagaaagctgactgccaaaatggattcgcgtatcgaggtttagaactaggcgtagtcgatttctaaaaaattagggaaatatgtgggtaaatactgttgctagtagatggatatcatgttatatataaagggtgttcggggagaacacgttgattgataactaaaaaggggtgatgcctatgaggctagccgattgggtgatgtcagccttgatgcttgcaagcctaaccctgcaaggggtggctatatggcagcagcgcaaaccgcgaaaacgcggtaagcaccgcaagggctgacaaacaaaggtgaggggttcaaaataatcgaactatcttgaacccctcaccgcctagcatctcatgacttacccctggaaaggaatattatggtgacccgaaacatgaccgtatcggcgctttcgctgctgataatcgctctagcaacacggataaccggtttacgctggtatacctggctattcatagcagcatggatagcccttaccgccatcggataccggcaggataaagcccgtgactaagcaacctaaacgctacctatccgcgctggacgtggctgaaagaatcgggataaaacgcggaaccctgtactcctaccgcgcaaaaggtatgctcccacccccggatgtaatcgttggaaccactactaacgctactcacggctggctccccaaaacgatagatgactggaacgctgctcgcccttcccgctctaaaaaataagagtgaaatataaataacatttagggtttttaatgttcaccgctctcagctaatgctagagtaaataaaaacaacaggaggtgagcaagatggcaaaggcaatcgatgtagctaaatatattcttgcctatcgagaagcaagataccatatgaccacagcttttgcgctacaaaaactcttgtattattgccaagcttggatgctcgtggctaaaggtcgccccttgttccccgaacaggttatcgcctggaaacacggaccggttgttaccgaagtatccccctactgcaaaggtcgccgcttggttttccctagggaaatcccggaggcaaacacgaataacctaacccttagcgaacgttctttaatagatcgggtgctgtcaatgttcgataaggaagaagacgaaaacctaggggatactcttgaagagatgagccaccaggagaagccctgggctagtgttgctattaatcaagtaatatcgcccgaaagcatgcttaacttttattcttctattcaggctgacccctcaatatcccatagcgccccaatccctgacttggcagacatatcggatcgtactttcataagcgccagcgatgcggatttccttgaagcctttttagctgaatagaggaatcaagttatctgtatgagcggtgaagcatggacgagagtcgttaaacttagttcaggtttaagaattgatggttttatcagtggtgaaccatcaatagatatgtggtttcagcgtgacgggctagatgagcaagagcaaggtggctgtaccgtctatgttgcggttgatgatgcttacacaatcatcgggttcttctccttatcaatgcacaagttacaaaagaacatagtccctggctctgtcaagaacgatttaacgatatcgggaaatattccctgcgtactcctggggcgcttaggcatagaccaccattttcgagggaaaatttttagacaatctgggggcaaatctcaaggccctttgttgatcaagcaagcgattaagcaggctcaaagtgtcgcggaaataatcggctgcagacttatgtttgtccaggcgttaaatgatgagctcatcgatttttattcgcggcaaggattcgtttcgttgcccagtaatcctagaaacatggtgctcgatttgagaaaatatcccagctagttccccaaagtgtatgtacaggagaaggacacatttttcttatcaccaaacataaatctcccaatctcagacccgttacacaaaaggtgctggttcttccaagtcctcgctgactttccggctcttaccgcgcctactcggataaaacctagcccccgcaccctcggcgctccaagttttcgccctaatgggaattcgctggagcccttttggtttttgttgctgagcatatttagttcgtgcgctactctgcgtagaaggttgctgataatcaaggcagatgcggctagcggctctaagatggcggatatggattaccatgatgaggattttttgcctagtgaggaagagctcgatgaaatctgggacttccttattgcacagtctgagttagatacacctttcggcaggattgctaaagcgaaactggagagtttacctccggaacctacaactgtcttttataccagccttgtacgggcaagtaataaaaaagttccggttcccagggatattattgagtattaccggggctttatggataagaaccaaatagaccacatggatctaagcaagcttattgtcgctgacgactaagcaagaaaaaatgattgttaaggattcggaattttagccagttaaggagagtcatcgagatggaggatcggcgtgaagtcatgtctgatggttcggtgtatgttgagccaactcccgaagaggaaaaagacatggaaaacattgctgttcgttggaaggaactagctcccgattttgcacaaaccatcgatgatattcggatggaagtgcacggagaaccaaccactgtcctagaagcgctcttaggttattgttattggcataatgtcgaggttccgcaagaaatacgagatagatgccagcactacatagacctggaaatcttagaagtctaaaaatatagcccaaaaactaactcgcatgcctggtggtgaatgcggggggggggcggcgctaggatgacggttatggattaccatgatgaggattttttgcccagtgaggaagaaatggatgaaatctgggacttccttattcaacagtctgagttagatacgcctttaggcaggatagttaaagcgaaactggagagttttcctccagaacctacgaccattttctgggtttgccttcttcaggctgttaatagaaaagtcccggttcccagggatattattgagtattaccggggctttatggataagaaccaaatagaccacatggatctgagcaagcttattgtcgctgatgaataagaaaaaaatgattctcaagtatccggatttttagccagtggaggagggcgtacgggatggaggatcggcgtgaagtcatgtctgatggttcggtttatgtagaaccaactcccgaagaggaaaaagacatggaagatattgcttttcgttggaaagagctagcccccgattttgcaaaggttgtcgataacattcggatggaagctcatggcgaacccacgactgtcctagacatactcattgcttattgttatttgaacgagattgaggttcctcaagaaatacaagatagatgccagcactatatcgacttggaaatcttacaaccctaaaaatagaaaactaagtaaacccgcaagcctagtgattaatgtgggtggcgtaggctaatgcgaaaaagcgaggtgaaagatgacttttaaagaagcagctttaatacctagtgaggaagagctagatcaaatctgggactttattattaaccagtctgaaatagattcaccctttggcaatatcgttaaatcagaactagaacttttaccttcggaaccggataccatttttatttgctccatgatggaggccatcaatcaagacgccccggttcccaggggagtcattgattattatcgtcattttatggatcaagacaagctagatcgtatggatttagaagatctagttgtcgctgaggattgagaaaaaatgattcttaaggatgcggattatttcccggtgaaggggggtgagcgggatggaggatcggcgtgaagtcatgtctgatggttcggtgtatgttgagccaactcccgaagaggaaaaagacatggaagacattatccaaagctggcgagatctcgaccctctagcttatgaagaaatccagaacataagaatagacctgcaaggagaccccataggagtccttgaaggagcgattgcaactatgggaagaattgggtctatcccggaagaaatctcccgacggtatcaaaagtatatcgacctggaaatcttacaaccctaaagaagaaaactacgctaccagtatcaactatagccagtactggtgagccgctcttttacctaggagcagggtgcaaaacccggtaactgctgaaggtgccccgtgagcgcttacccccatttagggcgcgggtgaggaaacttacagcacaaatagggtcacgaactttcttttagctgcgcatctgcactaagctaaaggggttgcgttccgccctggaaagtcacggcagagacctggtgacctgcaaaagcagatcattttgagtctgccactttcgtggccgactggggagccggcctcgccgggcaacaggaagaaacaacctaacgggtgcattgtgcccaggttttaggagaacacgatgattcaacaagagtcgcgactgaaggtcgccgacaataccggtgcaaaggaactgctttgtattcgggtgttgggcggctccgggcggcgctttgcaggtattggtgacaccattgttgccactgtaaaagacgctattcccggcggcaatgtcaaaaaaggcgaaattgttaaagcggtaatcgtgcgcactcgtaaagagcgtcgccgtcaggatggttcctacatccgctttgatgaaaacgctgcagttattttgcagccaagtggagaaccgcgtggcacgcgtattttcggccctatcggccgggaactgcgtgacaagaagttcatgcgcattatctctctagctccggaggtgctgtaaatgggagcgaaaataaagaaaggcgatctggtagaggtcatcgctggccgtaccagtgacgaaaagaaactggccaagcgcaacgagcgtcgcgcagaaaaaggcctgcccgccctcaaaccgggggataagggcaagcagggtcgggtactcgaggtttaccgttccaacgaccgggtattggtcgagggcgtaaatatccgtactcaccactctcgtcagggtcaaaaccagcagggacaggcgactggcggtatcgaataccgcgaggcaccgattcacatttccaatgtggccctggttgatcccaagaccaagaagcctacacgggttggtttccgtgaggaacaggcagagcgcggaggccgtctgcgtacggtacgagtgcgttacgcgaagcgttccggggaggacatctaatggcagaagcaaaaactgtggctccgcgcctaaaggtgcgctaccaggaagaaatccgtaaatccttggaaaaggagttcggatacaagaacgttaaccagattcccggcctcgaaaaagtggttgtgaatatgggtgtaggcgaagcctcgcacgactccaaactaatggagggcgcgattcgcgacctaaccgcgattaccgggcaaaagccggtggttactcgggcacgtaaatcgatcgcgcagttcaaactgcgtgctgggcagccgattggcgcgcacgtaaccatccgcggggatcgcatgtgggagttcgtagaccgcttggtctccactgccctgccgcgtatccgtgactttaggggactcagccccaaacagtttgatggccgcggaaactacactttcggtttgaccgaacaggccatgttccacgaaatcgatcaggattcgatcgatcgcgtgcgcggcatggatatcactctggttaccactgccaacagtgacgaagaggggcgggcgctgctgcgcgcgctgggcttcccgtttaaggaggaacgttaatggcgaaaacggcgctgaagaataaagcgaagcgtaagccgaagttcaaggtgcgtggctacactcggtgcaaccggtgtggacgccctcgttcggtgtatcgcaagttcggactttgccgtgtctgcctacgtgagctcgctctacggggcgaactcccgggcgtcactaagagcagttggtaaaactactacgttgcaggtctgaaaaagaaaccgcagcgaggaagggttagaaccccaaaatgactatgacagatcccatcgcagatatgctgacgcgtctgcgtaacgccaatgcggcgcatctggacaaagtgtctatgccttcatcgaaaatgaaggcgggaatcgcaaagattcttgaaaacgaaggctatattgccaaaagtgaagtgactgatgcccgcgtgggcaagaccctcactttgaccctaaagtatggaagcaaacgcgaacgggcgatcaccggttgcaagcgtgtttccaagccgggtctgcgtaaatacgtaaaatctactcaattgccgaaggtcatgggaggcctcggggtagcgatcttgtctacctcctctggtctcatgactgaccgtcaggcacaggacaaaggtgtaggcggggaagtccttgcctacatttggtaagggggaataaggatgtcacgtattggcaagaacccgatctccctaccttccggggtagaagtaaagatcgacggtctgaaggtttcggttaaaggccctaaaggccagctggaacgttcctttagcggaccgctgaagattcgggaagaggacggcaaaatcctggtggagcgggacgaagatacccgcgaagctcgctctttgcacggcctcacccgctcgctgatttccaatatgatcgagggcgtaactaacggttactccaaagagatggaaatcgtgggtactggttaccgcgtattgacccgcggcagcgatattgagctgcagctaggtttctcgcacccggtaccgtttaaagctcccgaaggtatcgaatttaaggttaatagcgcgctatccttcactatctccggcattagcaaggagctagtgggcgagaccgccgcgaagatccgcaagattcgtcctccggaaccctataagggcaaaggtattcgttacaagggcgaattcgttcgtcgcaaggccggaaaggcgggtaagtaaatgtcgtatacccctaaaggtaaaggcaaattcgtcgctcgcaaacgccgccatattcgcgttcgtaaacgggtatatggtacggcgcagcgccctcgtctggtggttactcggtctaaccgccacatggttgcccaggttgtcaatgacgatttggggcacaccgtggtttcagcttccaccttggaagcggagcagcgaggcgagaagatgaagaaagttgatgcggctcgccaggttggcgaacgtatcgctaagcgtgccctagaggcaggcatcacggctgtcgtgtttgatcgcggtggcaacaagtatcatggtcgcgtcgccgcggtggctgaaggtgcccgcgatggcggtctgaagctgtagaggagagggaaaataatggctgaagaaaataaaaatgccgattcccgggaatcccgtggcaaaggccgcgaagaccgggggcgtaagggccgccgcgacaatcgtcgtgagcaggaaaagaatcagtatttagagcgcgtagttaccattaaccgtgtttctaaagtagttaagggcggacgtcgtttcgctttcaccgcgctggtagtagtcggtgacggcgaaggtatggtcggtgtcggatacggcaaggctaaggaagttccccaggctatttctaagggcgtcgaggacgcaaagaagaacttcttccaggtgccgatgattgggcggactatcacccacttggtacagggtgaagaggctgccggtgtggtacttttacgtccggcttctcccggtaccggtgtaatcgccggtggcccggtgcgtgcagttatggaatgtgcgggtattcatgacgtgctaaccaagtctttgggtagcgccaacgctttgaatatcgtgcgggccacggtagcagctctgaagatgctgcagcgtccggaagaggtggcagcgcgccgcggactccccgttgagcgggtagttccggaagcgatgctgcgggctcaggcagaggcacgggcagaaaaagccgagaaagcgaagaaagacgaggcggaaaaagccgccgacggtgtcgctgaagaggtgaaggcctgatgagtaagctcaagatcacccaggttaaaggcctggttaataccaaccagaatcagcggcgggttatgcagtcgctgggtctgcgcaagattcaccagagtgtggaacaccaggataatccggctgttcgcggccagatccgcaaggtttctcacctggtgcaggtagaggagattggttaatggctgaagatactaaggtaaccgaagcagaagacactgcgaaagaggacgtaatccggttgcatgatttgcgtccggctcccggctccaataagcgccgtaagcgcgtgggccgtggtgaaggttcgcagggtaagactgccgggcggggtactaaaggtactggcgctcgcaagaatgttcatccccgtttcgaaggtggtcagatgccattgcatatgcgcctgccgaagttgcgtggattcaagaaccccttcgctaccgtctatcaggtagtgaacctggatcgtctgcaagaactgttccccgaagggggagcggtcacggttgatgatctagtttccaagggagcggttcgtaagaactctttggtgaaagttctcggcaccggagaaatctcggtgaaactggaactggtggtggacgcctggtctgccagcgccaaagaaaagattgaagctgccggcggttcgctgagcaagcgggagcaagattagtttgcacctagctgccggaggcagcagataaatctagatagctagataatcctgggcggggaaaacatttccccgcccaggattttatttttcggcaacgctcatttactgtggcgcaggcggcagtagcgacgactgtgactttggctaatcggcgccaaaaaacttgacacctgcgacccctagctctttatacttgtaacatatttgttatgaaaacgttatgaaccgtctagcttgctagcggcgcgaccgtcaggagatattttgcgtaaaacctggttgatggcaccaatcgtggttatggcgtcctttggtttagtggctgcggattctgtccacccctccgctgcagccagtaaagcaggcgtcgatgtttcaaagattgccagcacgatgctggaagaaaatctttacaaccaagcgatttcggttgacgatggggttaaggtttcctctaataaggtaactgcagtttctgcgggggcatctaccgcagtactaactaaggcggaaacccctaattgcgccactcccagtggcgacgctggtatacagccctggccgcggcaagtgcgcactatggtctcccagcgtttcggggtgaccaatatcggaggtttccgtgcgggtgacccccaagatcacggtaaaggcttagcactggacgtcatggttccagtatctagcgctttgggagactccatcgccgcatgggcgattgctaatagcggggatctaaacatcaaatatgtgatttggaaacagcgtatctggatgcccggacgtagctggaagggtatggaagatcgcggatctactacccaaaatcattacgatcacgtgcatctcagcttcaacggtggctctggtcgctgcatctagaatttttcttatatagttggatgctcgctagactagcgagcatccaactgttttattttcctcgtgctagtaatagtagtcgctgtctgggatactgccgttttctcgcggcaatgcgtgcgtagcatatacgccaagctcattttgaattttttagggaaagcacgcccctagagccacttagtgaactatttcataattgtctaaaagtttctaaacagctacagcacatctgaattataagattcagttgaatatatcttcccagttatgcaaggctagccttgtggttggtttcaataagtagatatatcaacttgccaacccccatctttctaagggaaggaatattaaatatgaagaaaacacggaaacttgccaccgctgtcgccgcttttgcgctttctttcgcaatggtgccctcggcaatcgcggccgactattcgaaccccgctccggggaactactcgaaccccgctccggggagttattcgaaccctaatggcggtagcaatgggactctcgctacgcagggagatgtaacccccaatggtacctctgcgaaatacggtgactacaccttcagtggtgatttgtcggctacccgtgatgggcagaccgtcagcttggatgcactgaaatatggcgacattttggtactgaccaccaaaccggttgtaaccaccggtgccagtggtaaatcatttgacaccatccagaatgtcactttgcattcaaatccggtgaatctgggtaacaagtttgttcccgcaggtcaaaccacaaccttcacccacaggttgggatgtgaacttcaggttggcaaacacaccgcagaactgaccgtctatcccaaaggtgaaaccgcggccgttgttaatgataaaggtttctccgcgttcaccatcaaggataaagctgaaaactgtggcaaattcgataaaggcttccagggaccaaaaactggtgccgtggcatcagtagcggctgtatcggcgggtgctctggcagctgctggagccggaattgttgctctccgtcgccgttttagctaatagattttaggtattgctaaataactaagcagtttaatggctgaggcactcaggtgcctcagccattaaatttatgtctatgacgatttacttttccgccgttactgaagattcttgttatgtctccatcctcacttactgctagacgcaaaagatttttgatcgctgcgctggttgtggcactggttttcgtgctgctaccgcttattgatctgttattactctccaagcaggtagaaaaagttaattttgctcagccccttggtaagggatctgatacctggcttttggttgccagtgattctcgcgctgacgcgcccagttacttgcaatctgatgaagatgaacaggcgcagggggaacgggcagacttaatctttttagctcgcagatcaggagctaagttaatcctggccgcattgccacgagatatagatgtgaactatcagaataatcccgcaactaggctgactttgatgctagtttttggccctacccgtttgaacgcatccttatgtaacgatattggggttccggctgagcactatatgcagatagatatgaagggcttcgttaagctcacagatgctctcgggggagtgcagatcgacgtagcccattctatgcgcgaccgggacgcgaaattgaatcttaagtcagggaggcagactctccatggtaaacagttgttagcctttgtccgggctcgcagttaccaggaacttattgatggtaaatggcaaaccattagtgccgaagaaggcgcgaacatgaggatggagcattccaaaattgcggtcagggaaatacaagacaagttggctaacacaaagaatccttttgtttggagaaaagcgacctggagcgtagccaaagatataaagattgatgaaaacagctcctggagtgaggtattggctttaaccagagggaacttagagtttcatactattgattccaaaatagtatcctccgacaaactgcaccggaagctgacccctaaaggagagcagcagctaagagatttaggtttcaaaaaaccttgcaaactttatcatcgtgagactaccgccgaggtcaacttaaaagactaaaaatattggcaaccacgatgagcattgaaaataggagaaaatgttttctttgcaaaagtcgaaaaggttgattgcaacaaaagatgccgggatgcacatcttctagcctatgtgccattaccggctaaaattgtgtaggctactaagggttatagaatcaacttttctgtgctgttaaagaacatagtgctggaggcagcttgcttagcgtattcgtacaggcgtttaagacgcccgatcttaggaaaaagctcctgttcaccttggcgattatggcgctctaccggatcggatctcatatcccctctccgggggttaactatccgaacctacaggcttgcctgaagaataatgagcaaaacggtctccttgacctggtgaacctgttctcagggggagcattgctttcactatcagtgttcgccatgggcatcatgccctacattacggcttcgattattacccagctgatgcgggtagtgattcctcgcttcgaggatttgcatcgtgaagggcaagccggaaaagccaaaatgacccaatacactcggtatctgactatcggactcggggtattgcagtcggtcaccatcatctatatggcgcgttcggggcagctgttgcaagggtgcgctcccagcaaaccgattattcctgaccaatcggcgctcaactacctcatcatgatgattactatgaccgccggtaccggcctgattatgtggctagccgagctgattaccgaaaacggtatcggcaacggtatgtccctcctgatcttcaccgggattgtggcaaatatgccagcacacctgcagtcgattggtgcttctggtggggtctggaaggtatttattatcatcggcttggttgctttgattaccctggcaatcgtgttcgtagagcaggcccaacggcgcatcccggtacagtatgccaaacggatggtaggcagacggatgtatggcggatccaccacctatatccccatgaaaatcaatatgtcgggggttatcccggtgatttttgcggcctcgctgctagctatgccgcaaatggttgcccgtttcggcaaacctactgccggctgggtcaaatggattaacgacaacttccaacacgactccttgctgtacctgatctgctatgcgttgctagttttaggtttcgccttcttctacacccagatcactttcaatcccgaggaaatcgccgacaatatgaagaagtacggcggcttcattcccggtattcgtgcgggggctcccaccgcagactatctacactatgtgattagccggattaccactgccggcgctctctacctagtagtggtggccatggtgccgattgtggcgctgattccgctgaaagtcacccagatgccgttcggaggaactaccctgttaattatggtgggtgtgggtctgcaaacggtacagcagattgacgctcagcttcagcaacaccactacgagggattccttaaatgaaaaaacgcctgttgattctgggcgcacctggtgccggcaaaggtacgcaggcgcgtaagatttgcgaactgctagatattcctactttttctactggagagatgctccgcagccagatgaaggcgggcaccgagctagggaaaaaagccaaagaactgatcgatcggggagagctagtacccgattcggtgattagctccctggtagaggcagagctacagtcaccgcactaccgcgaaggttttctcgctgacggttatccccgcaacctggaacaggctcatttcctggatcgggtactcaaagatatgggcactaagctcgatgcggtcatcaatttggatgttcgtctagaggacgtggtggggcggctactcaaacgcgccgagattgaaaaccgttccgatgataccgaaccggtaattcgtcgtcgcctacaggtctatcaggaacaaaccgagcccctggtacgttactatcgtgaggctggtctgctaataaatatcgatggtaatggctctatcgatcaggtttgggatagtatcgccgcccagctgcagtaattgaaaaaccgaatcgggaagaagataagtagctatgctatttgggcgcggcattgaaataaaaaatcgacagcagcttggttatatgcggcaggcggcgttgattgtcaatcaaatccatgaggccgtctgggaaaatgcgcggacaggggtgactccccgggaaatcgacgagatttcggcgcaggtaatcgcggatggtggcgcccattccaacttcttggggtattttgattaccctgcgaccatttgtatctcagtcaatgacaccgtggtacatggtattcctggagatgttcccttcgaaaccggcgacttagttagtttcgattgtggctgttacctggagcgagatggaaaacagtggcatggggattccgcgttttccgtgattattggagaagaaccagcaccgaagccccagccttctattgccgctcatgaatacccgacgtcctcagaaaaagagcagctgctagaaattactcgctacagtacctgggcgggagtagcggcgatagctggctcgcgtgcccgggtgaacgatattggtgccgcgatcgaggacgcagtggactctttcggtgaacgtttcggctggacggcaggaatcgtagaagagttcactggacatgggattggtactgctatgcaccaggcacccgatgtgttcaacttccgcgccgccgggcgatcagcggcaatcaaacccgggatggtgctgtgcgtggagccgatacttactcgcggttccaataaagttgccactatggccgatgagtggacagtgaaaaccgtagatcacgcccttgcctgccattgggaggcgcaagtcgcggtgttagaagacgggatttgcgttctcaaccagccagattttggtgcggcagctctagcgccttttggaataaagccggtgtcgctgtaagtagctacccaaggtatcaacgctgtagctgcctttaaaatctccgtttccagttgcggccgtacctttttattcagcgctcctgcgctccctcctggtacagtcagttctgaaaaggaggcgagccaatgcgtatttcctttaggaaacttacccggatgctatcgcagctaggcggcagccagctggagcaagcgacctcgcaccccaatcgccgtcggcagcagaaaaaatctgtgcacccttttgggcgggcgcgttatctaactaaaggtgacaagattcctcccttcgtttatgaccctaaaatcggcaatggagccgccgacccaggcgaagtgatttggtgttgggttccctatgaagaagaggatgggcgtggtaaagatcggcccgtgctggttatggccgcaaccgctaacgcagttatcggaactcagctgaccagcaaagatcacgataaagacgccgaacaggaagcacattgggggcgctattggatggatattggcgctggagcctgggactctaaaggtcgcgaatcagaagctcgcctggatcggttgttgctcattcctcgtcgagaagtgcgccgggagggtgcccgcctagaacgtgagctgtttacccaggtcgcgacggctatccgtaaacgacaaaaactcaaatagctaaccaccggtatccggctatggatggggtgaaggacctacttgttgaaaacgtaaggtgcgagctgcgacacgctgatgattgcgaaaaaggcaaaggcgtgaccgatttaaccctctatcagctttaggtttgtcccgttactaacgtaaggttgactattgggtttgtgactagaggggcaaagtgtaccttctggtcatcctatgtggacaaggttagtgaaggatagatggcgaaaaaagaaggcgttgtagaggtcgaaggtaccgtagcagaggcactcccgaatgcatattttcgggtggaactcgagaacggtcataaggtgctagcgcacatttcgggcaaaatgcgtcagcactatatccgaatcttgcccgaggaccgcgtggtcgtagagctcagtccctacgatctatcgcgaggtcgaatcgtttaccgatacaagtaagacagtattggcggtgggataatccggccgcaactagaggaaaattatgaaggttaaacccagcgttaagaagatctgtgaaaaatgcaaggtgattcgtcgccacggcgttgtcatggtgatctgcgataaccctcggcacaaacagcgtcagggttagtcgaaaaataaaatagcgcactatcggcatctttgattttcaaaggtgaccccaggtccggaggcctgggccgcaacagcggaagatagcgcgacggcctccggaaaaatgtggagagaaaattaatggcagcacgtattgccggtgttgatcttccgcgcgagaagcgtctggaagtggcacttacttacatttatggcgtcgggcgcacgcgcgctcaaaaaacgctgaaagaaaccggagtttctccggatgtgcgcgtaaaagatatttcggaagaagatctgattaaagtacgcgactttattgaatccaactacaaggttgaaggcgaccttcgtcgtgaggtccaagccgatattcgccgcaagatcgagatcggttcctaccagggactgcgtcaccgcttccatttgccggtgcacggtcagcggaccaagaccaacgcgcgtacccgcaagggaccgaagcgcaccgttgccggtaagaagaaggctgtataagtaagcgcaggcaccacctgctggatctgaggaaaagaaggaagatatggctgctagttccataaagagccgtaagccgcgtcgggctgcgcgtaagaacgttattcagggaaaagcgttcattaagtccacattcaataacactatcgtttcgatcaccgatccctccggagctgttatctcctggtcatctgccggtcagatggggttcaaaggatcgcgtaaatctacgccgttcgctgcgcagatggctgcggaagctgccgctcggcgcgcccaagagcacggcatgaaaaaagttgacgtgttcgttaaaggaccgggttctggtcgcgagaccgctatccgctccctacaggctaccgggctcgaggtggggtccattcaggacgtcaccccgcatgcccacaatggttgccgtcctcccaagcgtcgtcgcgtctaacgcgtcctaactgaagcagaaaaaagaagatagtaaaacacttctgtgggtctccaggccgtcatttgggagatttcgcagtcttgtctaagaagctggcctcaggccagaacgttcgttccagtcatatggcgggctgggcggcagaaaggacaacacgttgcttatttcacagcgacccgtgctatcggaagaagtggtcagcgatcagcgctcccgcttcacccttgaacccctagaacccggattcgggcacaccctaggaaacagcttgcggcgtaccctactttcctccattcccggagccgcagttacctcgatccggatcgagggggtgccgcatgagttccgtaccatcccgggagtgatggaggacgtctccgagatcattctgaacattaagcagattgtgctttcttccgagaatgacgaaccggtggtgatgtatctgcgtaaagcaggtgcgggacaggtcaccgcaggggatattacccctccggcgggagtagaaatccacaacccggatttgtacctggccactcttaacgagtctggcaagctagaaatcgaattgacagtagaacgtggtcgtggctatgtttccgctgatcagaacaagtcggatgggcacgagatttctcggattcccattgactctatctactctccggtggtgaaagtccgctacaaggtagaggctacccgcgtggaacagcgcaccgactttgaccgcttgattgtggatgtggaatgcaaaccggggctagctcctcgggatgcgctggcttctgcaggtaaaaccctggtggagctattcgggctgtgccaggaactgaatatcgaggccgagggcatcgagattggtgctccgcaaaccgatcaggcgctcgcccaagatttggcgctctctattgatgacctgggtctgcagtcgcgttcttataacgcattgacccgcgaagggatcaacacggtggggcaactggttgcccgttccgaggccgatctcatggatatccggaatttcggcgccaagtcaatcgaagagattaaggcgaaactcgccgaaatggggatggcgttgaaagattctccgctgcccaccccggtcagcctggacgacctggccactcccagttcgctacagttctctgacgactaagtcgggttttctcggcgcgaaaacaataaagttttttaggaaagtaaaggaagaaaaatgcctaagccaactaaaggtccccggctaggagccggcccggcacatgagcgcaaaattctggctaacttggcgaagtcactgattgaacatcgttcgattcgtaccactgaagccaaagctcgtcgcctgcagccttatatcgaaaagctgatcactaaggcgaagaagggtgatatccacaatcgccgtatggttgcccgtaagctgggtacccaggttgataagtatacccgcggttttgatgcggtctacactctgtttgatgaggtagttccggatttggatcccaaccgtcagggcggttacacccggattgtgaagctgccgactcgccgtggagataacgctcctatggccgagatttctttggttactgaaaaggtagaggcgaaagccaaggtgcagcccaccaaggaagaagcagctaagccggagcccgctgaggaagctaaagaagccgaaaaggtcgaagaaaccgcggaagaagcggtagaaacttcggacaacggcgaagaaagctccgaagcggcagaagctgaagagactgaagaagcggaagataccgaagaaaagtaactccgctagtatcggcgggtaactccgctagtatcggcgggtaactccgctggtatttaacagctactcggtgcgggcagttggcagctagttgccaactgcccgcattattttttggctcctagttcaggaaaatcattcttagaatcggcaagtacaaatctccaggtaagctaggaatatgggaaaacagatgaaaaatctcctcactttatcggtagattgtgggggcgggggaatcaaggcctcggtactcgataaacgaggcaccatggtggcaccttcactgcgagtacctaccccttacccgttgcctccagaaaagttaatcgaaattgttgagagttttcgttccgaatttcaagtaggtaccaaccggatcaccgtgggaatgccgggaatgatccgccacggggtagtaatctccaccccgcactatgtgtgccgatctggaccgcgcacccgtgtgctaccagaaatggtgcaagcctgggaaaactttgacctcgccagagccttggaagaggcaacagctctaccttcgctggtgttaaatgatgccgaagtagctggagctggggtgatctctggtaccggcatggaaatgattattaccttgggtaccggcttggggaactcgatttgggatggggggcgtctcgctcctcatatggagctctctcatatggtagcccgttggggattgctattcgatgactatgtaggcgagcccgagcgggtacgaatgggggatactcactggtcacggcgagttcgccgggtggtaggggttttgcgggaggcgatcatgtgggatcggctctacctgggagggggaaactcggcgcatatcgtggaatcggtgcgtaagaccctgggagaagaagtaatcatcgtacctaatgatgccggtatccgtggcggggtgcgcgcctgggatttggtgacttaatgagtgcccggatacgtttacgcctagaccttgcctatcgcggacagccctttcacggctgggcacgccaacctaatctattgaccgttcaaggtcgcctggaggaagccttaaccctgattacccgccagcaggcgcaactcacagtggcggggcgtaccgatgtcggggtacatgcccggggacaggtagcgcatctggatgtgcccgcagagttttggttttccttatcgcgaggacgcgacgaggacgaccaagtgcgcgccgcacggctgcgtgcccgcctagaaggcttagcgggacgcggtttaaacggtgctttggcagtcaagcagatcagcgtagttgcaggggattttgatgctcgattttccgcgctttcccgcagctatcgttacctcatttgcgacgatccccgggcggtagatccttgtcgcctagatatcgcgcgcgcgtcctcgcccttagacgcgaaaaaaatgcaggtgtcggcacaaactcttcgcggtgagcacgatttccttcccttcgctaagcctcgcgagggcgccactaccgtgcgcaccctccattcctttactatttcgcgtccccaaccgggaatcgtgcaggccttgatttgtgcggatgcgttttgtcattcccaggtgcggttcatgatgggcgccttgatcgaaatcgggcgaggaaaatatgaccctaactggatagcggaactcttagctgccggggtgcgtgaccaacgagtaccactcgccgatgggagggggctaaccctttgggaggtttcctatccacctgccagtcagtacgctgcgcaagcccaaaaagctaaagtagtgcgcaccctaccgcaggggaatagccgataaaatcggtgtcgccaggacagaaagaatgagtgaataaaccagctattgattatttgggttgttgctagccatttgactggcaatttccttcacaggaatagatatcggggaagataaattcttcgttgcgcccacatcttctttaaagggttccgccccgcaataatcatctacccccattttcagcttgacgaggctaaaggctccagcgacttccccagcatctacatctagttcgtacccttcctctatcaaggcgctatatatggtagacccacgttcttgttccgatagtttcccataatcttcacaggtcatcgccgatttagatgtaaaaaatccggtcgagactacaaaccagataatcgccacaactactacgattaccactatcgcgattagaccgagtagcaccacgaatactggtgatagcttctctgattcatccgaggaggaatcattgggattgttatttgctggattgggatagtaatcagggttttcttcgttgatcatgttgccatgctatctgcgcatacctgcctttacgcggagtttgtttgtatgaaatctaaggtataagcaactcttgagggtgttttcttgattagataacctaaagatgttttctgaaaaagcagtttgttcagtgtctgtcaaagttgcagtgtgccaggaatactttggatagctggttcggaaagttgctgagcgaatgctccaaaaaatcttatattgtctatcctctgatatcagagaaaggtacgagcgatgacgcaaatctctagtgacggtgaaaattccccgctacctgctcaagatagccctgtgggcggtaatccttcagggatgccgccgagcggatatccgcaatgcaacccagaaacttatgggggtgggagcgcaccccagtatccagtgggatacccgcagccgccagcctatccacaaccaccgacctatcagcagccgcccaggcgcccagagccaccttggcaggctcaaccaacgaatcctttagaggaatcttcgagtagcctctcaccccaactccaggattatcagcagatgcccgcgccggtaccacccgagtttacacaccctcctcagccgagtagcatgcctcgtatttggaaagttgccctgattaccttggtggttgtagctgttgtggctgtaggggtgtttgtggggttgaaaatatcgaaggcagactccagctccgccctcaaatcaaaaaccgcaagcagcgccgtgcccaaatcgcctaaagcaaagcaaaccacttcggtacctgctgattacatcaagaagattgattttgccaacagctatttgcccaactttagtgaatacagtgcagaaaaatgtagcgaaaaggaaagtgaggataccgaagtccctttcatgaaaatgccggatagttctgatccttgctggattaaaatgaatggcggagtttctgaggataaattttctgagagttttgaccagggatatcgccatataaatgccggtgatccggttagtaagttaggagaaaactcttcttatgctgttggctgggaagaatatacgcaccccagcggcactccttattatctagctgatatgaatggtgatgggtatttagatgccatgaccgtgggtgggaatatctcggaaggcacttttgccaatctgtgtattttagatcccgcagatcctgaccatccctattgtctggcacgttggattactttggggggatcacaacgttttgactttaacggtaataacgagatggctcgtgcgctaaataacggcgaggtcgagagtacttttaccgtcagtatgaaggatgggaaaccatatcttacggaacatgccttagataactaaaaccctagctgcaggttagggcataaagtctattccggtcttaagggagtgccttcgcccttagttcttgacccaaaaacagcaggcgatgtgctaaaaataacaggtaaaatttttgccccagcatcactacaccggatatagtcaaatagttgtgtgtcctggaacaatccaggcgcaggttatttacctgcagcattggcaaatacgggacgctagacggaaagaaatgcaaagtcgggtggaaaacactacggcggcgtccgcaacattttaggcacttgttgccgtttctgttgccgcgccctcgcagaatctacccccaaggaagaaacgaaggcttaagcccgtgcgaacttataatccgaaagccggtgacacccaagataagaagtggtatgtcatcgacgctgaagacgtcgttctcggacgactggcggccgttgccgccaagctgctgcgtggcaagcataagccgacctacactcccaacgaggatatgggcgatcacgttattattgtgaacgccgccaaggtcggacttaccggcaataaacgtgagcagaaacgcgcctaccgtcactccgggtatcccggtggcttgaaatctctagcctacggtgacttactagataagaaaccggaagtagcagtacaaaaagcggtgcgcggcatggttccccacactaagttggggcgtgcccaaatgaagaagctgcatgtattcgcaggtcccgaacatgaccacgcggcacagcagccggaaccttacgaaattaagaaaatcgcccagtagccctgagccaagaccctgaggagaattgtggctgataccaccgaaaacgaagagctgttggaggagaacgcccccagctcttacaccacggaaacccagtcggagccgaccggctccggacagtccgtgacagctcccggcatcgggctgggacgccgtaaaagcgcagttgcgcgtgtccggttgaatccgggcagcggcgaatggaagattaacggccggactttggaagactatttcccgaacaagctgcatcagcagctagtacggtcgccgtttaccctactagacctagaggggcgctttgatgttgtcgctcgggtatctggtgggggaagctccggtcaagccggggcagtgcgtctgggcgttgcccgcgcactaaacgaaatcgatcgggaagcgaaccgtcctgccctgaagaaggcaggattccttacccgcgattcgcgcgctgttgagcgcaagaagcctggcctcaagaaggcgcgtaaggcttcgcagtactccaagcgctagttttttacgcctagttatttgcccggtaaggtcggttagtccggctttaccgggcaaaactatattttgccgccaaggtcgatgaaatcatgaatcgagagtatggcatctaatcagattttgcgtaggaacacgttttctaggcggtgctgggcgtctttacgcaagattagtgtcgcccgccctctggtcggacgaatctgttgctccagattgggcaggtttatagaggtccaaatatctacggcgatttggcgcgccaccgaatcggagatccccgcgtagacctggaagtaagattcgggatctttaaaagcggattctttgagcgatacgaaacgctccacgaaccattgttcaatatcgcgggtccgggcatctacgtaaatcgaaaagtcaaagaagtcactgaccgccaaggatttatgatcatcgagcccgctacgcccatcatcttgatccagcagtttttcgaggttaggcaggtcttggtgaccccgatagaaccaggcaggttgcaagacgttgatgccctctagaatcaaaatatcggggctggcaaccgtcacatatttatccggcactacgtcgtaagtgacgtgcgaataaaccggcgcttttacttccggcactcctgcttttacctgggtaacaaaatttaggagcgcgcggcggttataggattcggggaatccttttcgcgccaccagcccgcgccgctctaactctgcattcggatacaagaatccgtcagtagtaaccaaggcgacccgtgaggtctctggccagcggctaagtagattctggaggatgcgagaagtggttgattttccgaccgctaccgaaccagcaaccccaatgatgaaaggaatttttcgctcataaggacgcccaaaaaaatcttgttgatcttgggcgagggcgcgcgaatgcaaaacccggtaccggagcagtgccgagaggggacgatagaccgcgtcggcctcctctaaatcaatcgggtcccccaaagcagccagagaacgcaaatcagcttcggttagcggcatcggggttttagcggcgagggcgcgccaagcatcccgatcgaactgttcgtaaatggattttgccgccatatccttagactccgctcaaaagtttcgcgctgattctgattcccggttcccgccagcgcctagatgaacaacgctggcgggagcagaaaatcaccctataaagacaagcgattcttaacttcgcccgccaggcgctgacaaaccgcgtcggcttgttcttgggtagcggcctccaccattacccgcaccagcggttcggttcccgaggcacgcaacacgacccgcccggtatcgcccaattcttcctcggccttagcgattttttcccgcagcccggcatcatcggtacgcgtcttgtctacgttcggcacgttaatcaaggtttgtggcaagcgttttacgaactcgcaaatcttttctagcggttggccagcatctttaaccgcacgcgcgatgcacagggcagtaagaatcccatccccggtagtggcgtggttggcgttaatcacgtgaccagactgttctccgcccagcacgaatccttgctcccgcatcttttctaggacatagcggtcgcccaccgcagtctgtacggtattaatccctttttctttcatcgccaaaatcaaacccaggttcgacataatcgtaatcaccagggtgtttccggtaagctcgcccttttccttaaaataggcagccagcattcccatgattttgtcaccgtccaccaggtttccttgggaatctaccgcgaggcagcggtccgcgtccccatcgaaagctaccccaaagtcgcagccggcagccaccacttggctctgtaactgttctgggtgagtggaaccgcaattgtcattgatattgcgtccatccggggaagcattgatcactacagtgtcgattccggcttcctgtagcgcctctggccccagcttggaagccgccccattcgcgcaatcgaccgctactcgcagcccagaaagatccccaactgctctcaccaggtgttcaatataaagtttctcggcgctttcccgttcttcctcgatctcgccgaccccttcaccggtgggacggtcagtttcgtcccccaggagctgctcaatctggtcttcaatcgcatcgggcaacttatagccaccgcgggcaaaaaacttgattccgttatcgggcatgggattgtgagaggcggaaatcattactcccaggtcaacgtcagctttggcggtgagataggcaacgcagggggtcgtaacaaccccaatgcggttaacgtctacgccctcggacgccagacccgcagaaatcgcatgatccagaaagtcaccggacattcgggtatcacggccgacgattgcccgtaggcggtggcctttcggcgtgtctttgcgcacctgtttagcggcggctcgtcccaattccaaagccaattccggggttaattctttattcgctagaccgcgcactccgtcggttccaaaaagtctgcccattttacctgtctttcaactagcagaatctgactttctcagcctaccgcaccaaacggtcttaattttccttcgccaccagctaccggggatatttcctatttatgctgcttaggcgagcgagatagcaatgtggcggaactcgtgggaaaatctattctatgtgtggaatcttaggaatggtagggctggcgcccactaaagatgcagaagaagtgattatggggggtctggcccgcctggagtatcgcggctatgactcggcggggattgggctttctacccccggtgggatccaaatccgcaagaaaagcggaaaactagcgaatttgcgagcagttttgcaagaaaatccgctgcctgaggcaatcgcggggatcggacatacccgctgggccactcatggggggccgaccgatatcaatgctcatccccatgcttcctccgatgggcaactcgcggtagtgcataacggcattatcgagaacgccgataatctgcgccgcgtcctcgaacagcaaggttttagtttcgtttccgaaaccgacaccgaggtaattgcgaacctgctggcagcatcctacttagctgatgagggcgaaggcaccaccctgggggagggcgcatctgaggtgcccgctcctgtcctagataaggcgcagttttctgccgaagtggctgaaggagcccaccgggcggcagcgcggctatcaagggcgctactgaagaccatggcgcagctgaaaggaactttcactattttggcgattcaccgggacgctcccgggatagtggttgctgcccgacgttcctccccactggttattggggtgggccaggattgcaactacctgggctccgatgttttagctttcgccgatcacaccaaacactgcctggagatcgggcaagacgaactggtgatggtgactgccaagcaggtaaaagtagccgacagtgaaggccaagcggttacccccaagcagttcaccgttgatttttcggtagaccgcacctctaagggtgggtgggggactttcatggaaaaagaaatccatgaacaaccccaggcggtgactgccactttgcaagaccgtaccgatgcgcaaggctacctcaccctcgatgagctgcgtatcagccaagatgtgctgcggcaagtaaacaaaatggtgattatcgcttgcggcacctccgcctatgccggacagattgcccgctacgcgattgagcattggtgccgcatcccggtagaagtcgagctggccagcgagttccgttaccgcgacccggtagttgatcagcgcaccctggtggtggcgatcagccaatccggggaaaccatggacacgattatggcggtgcggcacgcccgcgaacagggcgcaaaggtactggcgatcgtgaacactcccggctcgacgattcctcgcgaatccgatgccgtgctgctaacccatgccggtcccgaaatcgccgtggcctccaccaaagctttcaccgcccaaatcactgcctgctatctgctgggactatatttagcgcaggtgcggggcaataaattcattgacgaaatcgcggattacctggagaaactggcggcggttccccacaagatgcagactctgctcaatgaaatggagccggtagtagaggtagctaaacgctacgggaaagacctgaaatccacgattttcttaggacgtcacgtgggttatccggtagcgatggaaggggcgctgaaacttaaagaaatcgcctatgtacatgcggaaggtttcgcggcgggcgagctcaaacacggcccgatcgcattaatcgagccgggacagttcgtgtttatcgtggtgcctaccccgcgccgccccgagctgcaccaaaaggtgatttcgaacctgcaagaggtgcgcgctcgcggcgcgattaccctggtggtagcggaagagggcgacgataaagtcgataaatatgccgaccatattttccgggtaccgcgtactcctaccctctatatgcccttgctaaccgtgattcccctgcaggtattcgcatgtgaggtcgccaagagcaaagggtacgacgtcgaccagccgcgtaacctggccaaatcagtcacggtagaataaaaggcaaggtcaaagggaactagcggcatgattgaggcattcgagaaacaaacagttaggcaagctgaagccaaagtagtagccgagcatcctcatggagcgttaatgaaaaaggctgctggcgaagtcagcgacaccactgtggaattcttgcttgcccgggatgccaaagtcgaggaaacccggattttggggttagtcggcggcggcgataatggtggggattgtctgtatgctttgtcctatttggcgaaactgggatacccctgcctcgcattactactgtcgggcaaacctcatgaaaaagcactggcggcggcggaaaaagctgaggtaaccatcgagcgggtggatttagccggcagtgctcgccagattgcgcgcctggctgcccggcgggctcgcgccgcccaggtgtggattgatggcctggtaggaacgggtgtcaacggcaaactacgcgaaccattagcgcaggtagcagcggagttgactcacctgtatgaatctaggagctccaaggtgctgcgagtggccatcgatattccctccggcattttcaccgatgatggtcgcttgcccgggcctttcctgggagctgacgtgaccgtcactatgggaggacacaaatcctcctgcctgctgccgccggccgcctatcattttgggaaagtacggctggtagacctgggtttgcagatgaaagaaccccgcttagcccgcctggaggcaggggatgtgggtgctctttggccggtacccggtccggaagaccataaatatactcgcggggtagtgcaggtagttgccggttcctccgccttccccctaaccggagtgatgtgcgtagaaggggcgggtcgagccggagctggaatggtgcgctatgtggggcctgaggacgcggctttcgcgattctttctcgtttcccggaagcagtttccggtgtgggcaaacatcaatgtctgctggtaggcccgggcatagatcccaaagattcctcccgagtacgcgaagcagtcaaccaggtagtacaagctgctaccagcgggattcctctggtgctagatgcgggcgccatcaatctttacaccgaaattacttcccaaatccccggcggaactctcaatcaccgcactgtgcttactccccacgcgggagaggcggcacgcctgctttcggcgctcggagccgggggagggcgcggcggagtcagccgcgcagaagtagaggcatcgccggcggcttgggtgcagtatttagcggataaaaccggtgctaccgtgctgctaaaaggagcggtcaccttaatcgccagtgctgggggaacgatgttcagccaggccggagcgccttattggactggaactgccggttccggtgatgtgctggcgggaatcaccgcggcggtgctggctcaacatcaggcgcgcgcagaacaatcgggacaccagctttctgcctctcgggtctcggcagcggttgcctccgccgcctgggtacacgctatggctgcccggaaagcggcgggactaccgtttgccttatcagacccagaaagcgcttatagcctgggggcaccgctggtggctaccgatattgcccgggcgattccgcaggctatcgcccatgctttggagcaaatctaggacggtatagtcatggtcatgaatactgattttccggcgcgcgcgattattgacttgtcggccctggaaaaaaacttgcagcagctgcgcaaatgcgacccgaatgttcaagcgatggcgattgtgaaagccaatgcctatggacatgggggcgcgcagatcgctcgtgccgccctagagttcggggtgaactggttcggagtggcgcagctggcagaagccatgcagttgcgggaggcactgaaagattttccggacgcccgcatcttcacctggattttcagcccagacgccaatctggatcccgcggttaaagccggcttggatattgcggtgtctaatccggaaaccttgttacgcgtggctagtgccgctcgcgcggcagagaagaaagcccgcattcacctggcggtcgatactggtatggggcgcgagggcgccctgcccgaaaacttagctcccttgctttcggcagccgagctggccagcgaagaaggaacgattgaagtcagtggaatctggtcgcatctggcgcgcggagatgaagcgggtgcaggcgaacaggctactgcccggcaacttaaagacttccagaaagcgtgcgaagcagctgaacagcgcggatttaccgggctggtacgccatctatcggcttcctcgggactgctgtggcatccgcaggcacattttgatttggcgcgctatgggatcgccatgtacggccttaccccgaatcccggccgcgcatctaccgctagcttggggctaaccccaatcatgcgccttgaagccgatctgatcagtgtaaagaaacttcccgagggacacccggtttcctatgggggcacctgggtggcgccccacgacacctatatcggaatcgtgccgctggggtatgccgacgggattgaccgccatgcctccggaaaaatttgggtagcggccaatggacaaaagtatccgcaggtaggacggatatgtatggatcagttcatggtggatttaggtagcggtgaagacgggaaaccgccgctggtgcctggagcgactgtgcgggtatggggagatggctcccagggcgaacctaccgccgacgattgggcgaaggctgctgaaaccataaactatacgattgttaccgacctgaatcctcgggtgccgcgggtctatatctaggaggaaacgtgccgatcactattaccgttaactcagctgaccagacgcgggcagtcgggcaggcgctggccacccagctgcgtgccggagatttagtaatgctttctggagggctgggagctgggaaaactactcttacccaagggattggcgccggtttgcaggtaaaaggacgagtatcttccccaacttttattgtcgcccgagtacacccttctctggtgggaggcgccgatctgattcacgccgacgcctatcggatcaaagatttaaccgatctagaaaccctggatttggattccactttagagcaggcgattaccgtcatcgaatggggagaaggaaaaaccgagcagctgtcggcagaccgcctggagattgagattcaccgagaagaaggaggggtcgctaccagcagcaatggggtagttgacttggcggacatggatgacggaaaacgcacgattactattcgaccccggggcaagcgttgggaaaaaactgactggaaaccggtgttttccgcgttcgagtaaagctaagaaaagtaggtaaaaacatgcggattctatgtattgacacttcgctaggcgcatcagttgccctttgggatagtgaagctaaggcgcaggtgttagccagccgattcagtcaggactctcgctcccatgccgaacacctatctgagctgatcggtgcggtagtgcaggaggcttgcgggtgtgcgctcgctaaagcgggtatcgaagcggtggcagtaggacgcggaccggctccctttactggtttacgggcgggactggttactgcccgcactatcggttacgcgctgggaatcccggttatggggatcagctccctagacgccctcgcacgagcagtattagatctggtgccccccaccaaggaagtcttcatagctaccgatgcgcggcgcaaagaggtttattgtgcccagtaccgcgcggacggccccgatgatgtttgctgcctgtggggaccagaggtgggaagcccggcaggttttgcgaatcgagcggctaaacccggtttgatggtagccggggcgggagcggcgttatatccccaggactttgcgttaaatcccggacttcccaccgaggtggaggcagcagtcttgggcagaatcgcacgggcgcgcctaaatgggcaaacgccggaagatttactagccaccgtgtcgccgctttatctgcggcgcccggacgtgcagcctcctagccagaaaaaatagaggtatcgtgactggctgtgttcctttaactcttgaggacgtaccggcgctgcttgccctagaaaaatcctgttttggggcggaaggatttagtgccccgcagctgcggcaaatgctaaccgcccgctacggtttggctttaggactctgggaggaggagctactggtgggggcagtgctactagaagtcttagtgccggaatctgagttgcattccctggcagttcagcccgctaagcgcagccgcggtctgggtagcgtcctattaaaatcggcgattactgaggccaggaagctcggagctaatgaaatgttcctagaggtgcgcagctccaaccaagcggcaattgcgctttacgaacgcgcgggattcactcctttgagcgtgcgccgcggctattattcccaacctcgcgaagacgccctagtgatgcacatgcggctttcgagcccctctcccggtccggtgggggcagaaatatctgcctcatgagagcgcaaaaagtattttgaaactttatgctttctcaattgaataacaattctcagattctatgccccgcggataaggattttttacctaatctttgcgccatcttctttgaaagtagctaattaaaatcccaggtagagccagattaacttcgattttttcttttttccgctggctcgtttcctccctagaggccaaaaatcttaagctgagtgaaagccgtgagctagcctgtaaaacgtggccaatacaaaagaaattcaaaagaggcgaagctggaataccctagtcttcgcgaaacagtgcatggccgtaaccggcatattctttgtactgtttgtgttaatgcattcctacgggaacctgaagattctagcgggggctgatgcctataacggttatgctcaccacctgcgggtctttggtgcccctatcctgccttatgaaggtctgctttggatcttgcgtgtcgtgctcctggcatgcgtgcttatccatatgatctgcgccttttatctctggcaccgcgctagcgcggggcgaggcagcgagaagtacgtagtcaaacagaacattgtgaacaactacgcgacccgaaccgtacgtgtcggctcggtgctgctagcgttgtttatcctgttccacctgctacattttacgactaagactttccaaatcggatcatccagtgcatatagcgccgctacctgcgaggtcgacggggaaatgatcccggtagcaccctggaacatgatggtaaccacgttctcaccagctaactggtggacgctgattatttacctgggtgcagtcgcgattgtggctttgcatgtgggacacggcgtctggtccgccctacagactatgggatggatccgggaaaacacccataaggcaaccgtttacatttccgggattgtggggctactgctgttcgccatgttcgccatccccccgctttatttggtaatcaccaaccccgctccggtggcgtgttagttagggaaggatgcgaaaaatgactgaacaagaaaatctagtcgacggtctttacaccgttggcgaaccgattgcagacaagaaagcacctctagaggtgccgattgagaaatgctggaaacaacgccagttcaatacggcactggtgaacccagctaaccgccgtaaaatcaaagttatcgtagtgggtaccggtctagcagggggcgcagcagccgcctcgctgggtgaaatggggtaccacgtcgatgccttcttctatcaagactctgctcgtcgcgcgcactcgattgcggctcagggtggtatcaacgcggccaagaactaccgcaatgacaatgactctgattaccggctgttctatgacacggtcaaaggcggggactatcgtgcccgggaaactaacgtataccggctagcggaagtatctgccaatatcattgaccagtgcgtagcccagggcgttccttttgctcgcgactacggtgggctgctcgataaccgttccttcggtggcgtgcaggtttcccgtactttctatgcgcgtggccagacggggcagcagctgctgattggcgcctaccaggcacttcagcgtcaagttaacgcaggcacggtggttgctcactcccgtcacgaaatggtggaactcattgtttccgatggtcgggcacgcgggattattgctcgcaacctggaaaccggggaactcgaaacctacaccgcctccctagttattttggctactggcggatacggtaacgtgttcttcctatctaccaatgcgatgggttcgaacgtgacggcctcttggcgggcacaccgcaagggcgcttacttcgcgaatccttgctacacgcagattcaccccacctgtattccccagcatggcgatcaacagtcgaaactgactttgatgagtgagtcgctgcgtaacgatgggcgtatttgggttcctaagaagaaagaagactgcaagaaggatccccgggaaatcccggaggaagatcgcgactactacctagagcgcatctacccctctttcggtaacctggttccgcgtgatattgcatcgcgccaagccaagaatgtttgcgacgaaggtcgcggcgtaggaccggaaatcaacggggttgctcgcggggtttatttggactttgctgaggctattgagcgcatgggtaaagaggcggtgtcggccaagtacggcaacctcttcgatatgtaccagcggattaccgatgataacccctacgaggtgccgatgcggatttacccagcggtgcactacaccatgggtggcctgtgggttgactacgatctggaatcctcgattccgggtctatatatcggcggagaagctaacttctctgaccacggcgctaaccgtctaggggcgtctgccctgatgcaggggctatctgatggctacttcgtgttgccgaatacggtgaatgattacctggctcataccttggattggcatgatttgccggatgatcatcccgatgttttggccgcgaaacagcaggctcaagagcgcattgatcgcattatggcgattgagggtagccgttcggtggattccatccacaaagaactcggtcacattatgtgggagtactgcggtatgtcccgcacccgtgagggactgaagaaagccatcggcatgattcgggaattgcgtaaagagttctggaccaatgtgcgcgttccgggtaagaagactggcgagatgaaccagtcgctcgagcgcgccggtcgcttggcggacttcctagagctgggcgaactgatgtgtatcgatgctttgcatcgtgaagagtcctgtggcggtcacttccgggaagaacaccaaactccggagggcgaggcactacgtgacgatgaaaacttcatgtatgtagccgcctgggaatggaaaggtgaagatcagccccctgtcttacacaaggaggatctgatttacaacaatatcgaggtcaagacaaggagctacaagtgaacatcactttgcgaatctggcgtcaggctggcccagacgccgagggggctatccacgaatataagctccacggagttagcgaggattcctctttcctggaaatgttggacatcctcaacgaggatctatttgctcgcggggaagagccggtcgcattcgactcggactgccgcgagggaatctgcggtatgtgtggcctggtagttaatggggttccccatggcaaccattccccggatccgaaagataacaccactacctgccagctgcatatgcgttctttcaaggacggagacaccatcaccgtagagccatggcgctctaaggctttcccgatcattaaggatttggtggtcaatcgtacggctttggatcgcattatccaggcaggaggctatatttcggttaataccggtgcggctcccgatgcccacgctaccccggttcccaagaaggatgcggatcgggctttcgaagctgcgacctgcatcggctgtggggcgtgcgtggctgcctgcccgaacggctcggcgatgctatttacctctgcgaaggtgacccacctgggtctattgccgcagggtaagccggagaatctgcagcgggtaacccgcatgcttaatcagatgggtgccgaaggtttcggcgggtgcaccaacttcggtgaatgtgcagcggtttgccccaagcaggtgccgctggacttcattgcggtgctgaaccggcagctaggcaaggctgttcttgctggagtataaatctgcagctagcggctaaatagccaatcttttgtatggtcaaggcgggcttcgagaataatctcggagcccgccttccgcgctttccagaattaaaacgtcctcttgcagcaaggttatttcccgataaagccgaaagctccatcctcgccccgtaaataattccgagaaatagcgattaactgttgcaattgttgggcagtagcctacaaatgcaacatgaagccacgctacttcggggggcgcaaaaagttagttagccccgccctcgggctgagggggagtgaaacggtacttgccttttcctttgcctttcactttgctgatcaaggaggcatccaggagttttcgcaatagttcagaggccggggagggggttatccccaatatctccgttacctgagaacgcgagaaaatgccctcagtcccgaagaaatcgtagagtttttgggcgtgccgagccgagaccgggctcagtcccgcccattcaatgtcctgatttttgaccccaatatcctgtttttccagtccaatatcctgttttttagataaaatcccattgtctgaggaagtaatgtactgagtttccgggggaacttcctgcccatcagacccaatatccggattttttgcctgactaactaaaccgctgatatgcaggtaccgatttttcaactcattttcttctcctagcagcaagttccgtaagaacttaactaggtattcgttagtttcgtgaatcccggcagttagattttcgtagttggcgcgcaccatcgcgtttcgaaaataccaagcgtgtttagagaaaagggtgttatcgacagtgaaacccaaggtgcggagatacttgatgaaaaacacggcggtagtgcgggtgtttccctcatcaaagaggtgaatctgccacaacctagccacaaaagaagccagatgctcaatgatttcggtggcattcagttcgcggtagctaaacgcacgttcaaaagccaaatcgtattccaaggtttccattaaatcggcagcattcccataggtaacggtatctccggccagtacccactccttcttggagatattgtaggtacgaactttcccggcctggggatagattcctgcaaaaagccggcggtgtatcgccagatactgcgcagccgagaacacaaatccgtcctcagataatacttgcgcaacccgggtagctaccttatctgcttcctccgttcggtctaagccccgctgagggttttgctgatagtaggaattaaccaggctttgagcttcgtctaaagtgatttcaccttcgatagagctcctagcggtatttattagatacggtgagggctctaaaccatcgacagcttgtaaaccgataccggcctgccaagcagcaatcagggcgcgttgagacggggatccttggcgcacatattgggcaaatggatcctctttaggttcttcgagcccgcctatatctgtcatcgcacctcctgctgctagtgccattttatctgagacgggctccgtccaacccattcaatgtcctgattttctagtctaatatcctgttttttgacctcaatgtcctgttttttcaataaagtcccattgtctgagtaagtaatgtccggatgctattccaaaagagttatgccagctgggggcgatatcgttaggtcgctaatccggggtgtgggtaaaataagaatatgagtgaaccgctgatcctgggaattgagtctacctgcgacgagaccggtgtagcgttggtgcgcggggggaagctgctggcagattgcacagccacctccatggatgagcacgcccgctacgggggaatcattcccgaaatcgcttcccgggcacacctggaatctttcctgcctactttgcaggctgcctgcacggaggccggggttactttgagcgaggtagatgcgattgcgtgcgcggcaggccccggcttggtgggctcgctgacggtagggatttctgccgctaaagctttggcgttggcgctagataaaccgctctacggggtgaaccacgtaatcggacacctggctgtagatgccctggtagaaggggagtttcatcctccatttattggactgatttgctcgggtgggcattcgaacctggtgttggtgcgcgatctggccagcgatattaccgaactggggggcactctcgatgacgctgccggggaagccttcgataaggtagggcggctactcggcaccccctatccaggcggtccgcacgtagaccggctggcgcaagcgggggataagaaagctatccgtttcccgcgagggctggccgcaggtaaagacaaagaacgccatcgctacgacttttcattttcgggtctaaaaaccgcagttgcccgctatatcgaagggttagaggccgccgggaaaaccattaatcgggaaaacatctgtgccggtttttccgaggccgtaaacgattcgctgactaagaaagcggtgcaggctgcccaagactttgactgccacgaaatcgtagtgggcggcggtttttctgcgaattcgcgcctgcgagaacttttggcacagcgagctgaatctgcggggattagcgtgcgcatccctccgatccgtttttgcactgataatggtgcccagatcgctgccctcggtgaggtgctggtgaaagcgggaatgccgccctcgcctacagattttggcccagattcccagatgtcgctcacccagatttatatggcgcccagcctggaaaataccgggaatccacaggataatagcagtaatgcccaagagaaagaggtagatgcggaaagcatctaccagaaggtgaaggaaaatatggcgaaatcatttgaccagatgcgtccgggttttgaaaaggccgctgaccggattaaacccctggtagagcaggggcgggagtacgcggaagaaactgtggagaaggcgcggccgtacgtagaacaggcggtagaaaagtctcgcccctacgtggagcaggctgcagagaaaagccgggagtacgcggaagaaaccatggaaaaagcccgtccctacgtggaacaagctgcagaaaaaagccgggaatacgccgagcaggcggtagagaaggggcgcgaatacgctaagcaagctcaacagcgtttacaggagcgttcgcaggcgcggaaaaccgatcccaatgaaccttcggtgacggtggaaccgcccgatgacgtggagccccgcctgtaacgctagctaatcctgtttgcggggcattaccggagtgcagattatttaactgccacgagcaccaggcagcggtgcgccccacctacccgggtcagagccacggttatggtgcgcggtgaccagtcgcgatttctcttgggcatcaccttttttcgccaagctgcgatgtcgagggcgactccgcgctttagaacgtcaagccgcgtgacttgctgagaacgtagataagagctcacctgcttagctttaagtggcagattttccactatctgatagcagtggaaccctaaggagtcttgttcgctgggaagagaatcccctgtcagataagcaatcccggtagatactggcgctgcccctaattcttcgcaaagatctggaatgattccggcgcgaataattgcaggatcaggatcgaaaaagtaactgcccaaggtggctgcctgcgggatttgcacatggtcttctccgggattgcaagcagtagagcagcgataatgttttacctgcctaccgcagataaccagcgcagatcgccccgcgccctcgggagctaatcccggagagtagagggcgcactccaccagattgccgtcaacgcttacccattgcgcgtgatagccgtccggtaggtacgccaagtcaatcccgggcgccattttcaccgcaagctggggcgagcgcttttcccattccagaacttttccgaggggaggcgaccaggaatcgggggagaggacgcgtccgacggcggcgcggcgagccggatctacaaatagggcgggcagagttttctgtgaggtaaggttatcggcgttttcgcaaaaaacttttgcggtcgatatctcagacaggttgattgctgcgcaggtagcggctgccgggctaatatcgactgctaaaaaatctgggcataggggtgccagttccatagagtcggatccgattccgcagccgagatcgatcatgctggtgacatcggctttcgcaaagcgtttagcacgctgggcggccactattttccgggtagcttgttcgaggccgtcgcgagtaaaaagtttattcttggcctcggagtctaatttttcttgggctttttctcgcagattccattgggtttgcaacgctgcaaccagatctgcggggtgctgcttacgcaagtgtttagcaatatctgcggcttcagaaggtgacgggcaaggatattcttgcagcaggcgccagccttccggggtggtcagtgccgcaatcattaagtcttccgcaggtggaaaggacgaagttagctgtttcatctgcttaaaactaagtgcgacttttcgagctaccatcgatttctcccctgtcattttcagtgtaaccgaggatttgccaggggttagagcgacgctttggttacccaaagaagtattcgcggagggcgtaagcgaaaactagcactcagcttgattgagtgccaggatagctttaagctaaatagtgcatttggagtcgccagactccagaccgtatcggaaatctgacaacccgcgacgtcaaggttccggtactaaaaccgaaaattttggaaaaagaaagggaggtctgcagtgtcagtctccattaagccgttagaagatcgcgtcgtgattcagcaggcagaagcggaacaaaagactgcttccggtctggttattcccgacgctgccaaggaaaaaccgcaggaaggcaaagtaatcgcggtgggaccgggtcgcattgatgaccagggcaaccgggttccgatggatgttgccgagggcgacagcgtgatttactccaagtatggcggcaccgaggtcaaatacggcggcgaagaatacttgattctttccgcgcgtgacatcttggcaaaagttgagcgctagagaatagcgctggctgggcgagattatctcgccatcaaaatagccattaagtgattggcggggtcggagaaatccgaccccgccttttgcatatctcttcctgctaccattccggcagccacgtggtggttaaaaagctgggggcgagataatctcgcccccagctctaaagctatttacctgctattttgctgtttgaatctacttttctctcggcgccggtaaaatcacgtcgcgtaccagttcctgcagatcagtgtcggacttgaggaatccgcgaagagtacgcacggtcggaccgaaggtgtcaaactcttcttcgctcataccgtcaacctcgtaggcgcggcggaaatcttccaccttcatcaaggtttccataacttcctcggataccggattgtcgaagcgcggctcatactgataatcggagtcctgaacccgctttgcccaagcaaagggcggagaaatcacgatgtcgccgccaaccagttcggtgtactgcatggtgttacggaaggctgcggccagcatccgggagcgtagaccccgcttctcgaactcggcagctgccttcttgaatgcggcgattccggcccattccaggtggccaggattgagaaccagcctgtcgcgggtagcgcaaatcttcatccagtcatcaaggcgaccgaccatcaaggttacaaccggccccatcttggaaacatctttgccttcggcttcgcgccgcttgaggccgcgttcgatggcttccccggagctaactgcctggggaaccgagaaagatacggtcacgttcatagacacgccccggtaggtggcgtcctcaatcgcttccatgccggtcttggtggccggtacctttactacgatgttgggagccatttcggagaactctactgcctggtcagccaatgctttggcgtttcggtagtaagccggattggtctgcaccgagaggcgaccgttgcgaccatttgaggcttcgaatgccggttctagcagcttcgcggcctcaatcgacatgtcctttacagcctgccaaccaatttccgactcggtggcggtgggcatattctcagcgatttttttaatgcgaggagcccaaatgtccaaattcttagaaaatgtggtgtaagcgatggtcgggttgcaggtcgcacccactgcgccccaagagatcgcttgacgaagctcatttaaatcagaggaatcgttccacagcgcggtcttcgaattcttggctgcatccagcaggggaccgggggtcatcttaatctcggtcattgagtctccttcgttatttttttaagcaccgtcttcagtgcgggttctcttccaggttaaggggtaaggaagccaacgtcaagactttgacaggacaatagggcaaagatcgtatgaccttagtcactaaaggctgatggtgaacttgtagcgagaggcgcggtaaatatgatccccgatttcaataggcgctcctgattgattgtaggaaatacggcgcaaagtcaaaatagctgctcctcgcggttctttcagggtttccgcttcttcggtgcgggccttgcgcgcgcaaatagtttgttgggcgctgaaaacttcgtgtccgtggcgccgcatcgcattataaagccccccagagcgcagttccttttcgctgggtgctacttccaacggtagatagttagtcataagcgccaagggctcgccattggccaggcgcaggcgaacaactttaattacactcgcatctgtatcaaggtgtaaatcttctgcgacgtcctcatcaggagaaacttcctcataagaaattacctcagtagtgggcttttgcccggtttgtttgaggtcgtcataaagggaagacagtttgacttgacgatgaatttctttgggggcgacaatggtgccaactgcgcgtttgcgcactactaaacgtagttcaaccagggactggagggcgcgccgggcagtagggcgcgataccccaaggcgggaagccatggacagttcgtcctcaagctttgcgcccgccggaatggtgccgtccaaaatgagctcttttatgggttcggaaatctggtgatacaggggaattggggagtcgtggtccaactctatatctgcgacataggttttgggggttgccatcattagctccttctgaacgagggtgtttgagccattatagcgcacaatgtcatataaacatgacaatatgcagaatgctgctaaattttccacatctggcactatgggggatctccgtatctctacgaataatccgctaattttgttgactatagatagggtttttatttttaggagcttcccctcttcttaaatctttgctagaatgtaagtacaaagcaccaaaggtgggcggtggtgcctacggctggtgctgacagtgtagtcaacaacgaataaaaagaggggaacgctgctgtgaatagtttcaaaatgcccgccgtggatgtactcaccatcgggcgctcgggagtggatatctatccgctgcaaaccggagtagggctagaaaaggtagaacagtttggaaaattcctagggggaagcccgatgaacgtggcggtagcggcggcgaagctgcgccactcatccgcgattatcaccggggtaggtaaagatcctttcggcagatttgtgcgttcggagatgcgttccttaggtgtgtatgacacctatgtagtcgataatccgagctttgctaccccggtaactttctgcgaaattttcccgccggatgatttcccgctctacttctatcgggagccatctgcaccggacctgcaactacgtgaagaagatattcctgtcgaggcggtaagagacgccaagatcttttggatttccgtgaccggtctgtccgaagaaccctcgcgcggcgctcaccactacgctctagaccagcggaacctgggagacgaaggcaagtggacgatcgcggacttggactaccgctcgactttctggagcgatgaggaaaccgctcaccgggaagttgaacgaatgctagaaaaagtctcggtcgcagtcggcaataaagaagaatgccgcatagccgtaggggaaaccgagccggatcgcgcggccgatgccttgctggagcggggagtagaaatcgcggtagtaaaacaagggccgttgggcactctatgcaaaaccaaagaggagcggattgaagttccagtgaccccggtaaaggtaactaacggcctgggtgcaggagattctttcggaggatcgctttgtcacggattgctttccggatgggatttgccgcaggttatttctgcggcctccactgccggagctatcgtgagttctcgtctggaatgttccacggcgatgccctctgaaccggaaattttggatatgatttccaagaaccctcagtccgctccgattgttactaagaggtagcgtcatgggaaaactgattgcaaagctagcggaaattcgcgcctttgagcccgaacgtataactgaaaccctaaagcagcgtcctcgacccagccttagggaagcattaaaggatgaagcaggtaagcctcgcaaattgatggtgattgcctgtgaccaccccgcgcgcggtgcgctggctgcgggtgatgatcccagcgcgatggccgatcgggaagagctgctggcgcgctgcgccgaggccctttcgcggcccggggtaaacggtttcttgggaaccgccgatatgatcgaggatttggctctgttgggcgccctcgataataaagtggttttcgggtcgatgaaccgcgccggactagcgggggctacttttggaatggatgaccgtttcaactgctacgatgcccaaggcgtggaagatgcgggcctggccgggggtaagatgctgacccggatcaactatgaggacgccggcacggtagcaactttgcaggcaactgcgcaggctattgatgaactggcagatcggaaactgatggcaatggtagagccgttcatttcggaagggcctgccgagaaggtcagtaatgttctcactccggaagcggtcataaagtcgatggcgattgcagctggactgggtcgtaccagtgcttatacctggctgaaacttccgtgcgtatccgagatggaacgcgttatggaagccaccacccttccctctttgatcctagggggagaagtatctaaggatcccgatgccgccatggagtcgtggggtaaggctttgcgtcttcccaatgtcttggggttagtcatcggtcgttcactattattcccggccggtggcgatgtgtcgcaggccgtagacgagacagtaggtttgctatgagtgataacgaaaattatttattccgcgatggtcagctaaaaaatggccagttcgagttggatttgactccggaaaaagccggttgggagttctcgggattgaaggtcctgaatctgccagccggagccagtcaggaggttagctccggtaacaacgagctgctggttttgccctttgagggcggctgcacggttacggtagatggcgaagagtttgaaatcaaaggtcgtaaagatatttggagcgaaatcaccgattatctgtacgtgccgatcaacaagaccttcacggtcagcagcgaaaaaggcgggcgctttgccctgcctagctcgaaggccaacaatgcgaaaccgctgcgctactgccccaaagatgaagttatctccatgattcgcggcaagggcgactgcactcgggaagtccacaactatacgatgggcaatccggtagaggtagaccatatactggtcacggaggttataactcccggcggtaattggtcttcgtatcctccccataagcacgatgagcattccgaaactgaacggattttggaagaaatctactactaccaggtaaaaccggccgcaaacggcactaccgggatggcgctgcagcgcatttatccctctaaaggacacaccattgatgtgtgcgccgaggtacacagcggggatgcagtagtgatgccgcacggttggcacggtccttcggtagccgcgcctggataccacctgtattatttgaacgtaatggccggcccggccgaggacgccgcctggttagtaactatcgacccggactatgtctggctcactgaggattggggcggcggcgatgctgatccccgcctacccatgaccaacgccaccatcaaggaggactaaggatggcaaaatttgagactgttcgcctaactactgctcaggcgactatccgcttcttaatcaaccaatattctgagcgtgacggtaaagaataccgtctgattcccggaactttcgggattttcggacatggaaacgtgtgtggcatcggtcaggcgctgctgcaaaacgaactagattccacccccgatgggggagtgatggaatactatatgccgcgtaacgagcagggcgcggtgcatgcggctgcggcttatgctaaggccaagaaccggctgcagacccttgcggttaccacttcgattggaccgggtgccttgaatatggtgactggcgcggcgctggccaccactaaccgggtgccggtattgctgctgccttctgaccagttcgctactcgctacccggatccggtgctccagcagctggaagatccgcgttctttggacgtgactgtgaatgatgcgttccgctgtgtgtcgcgtttctttgaccggattaaccgtcccgagcagctgatgccttccttgatgaatgcgatgcgcgtgctaactgacccggcagagaccggtgcggtggtgctggcgatgccgcaggatgtgcaggctgaggccttcgattggccggtagaaatgtttgaaaagcgggtttggcatgtgcgccgcccggcagtatctgagaccgagatggagagggctgccgcgattattaagtcggcgaagcgtcctttgattgtttctggtggaggcacgatttatgcggaagcctctcaggagctgcgcgatttggcgagcgccaccgggattccggtgtctgacacccaggcgggtaagggcgctatcaactatgaccacgaatgcgccgtaggtggcgtgggctctaccggtgctaatagcgcgaaccatttggcagataaagcagatgtggtaatcggggtgggtactcgctactcggacttcactaccgcatcccacacccagttcaagaacccggatgtacgttttgtaaacatcaacgtgaaagccttcgatgcagctaagcatgcgggtgaaatggtggtggctgacgccaagttggcgctggctgctttgaaagaagcactcggagattaccgggttgacgaggcctacaccaaggaaatcgctagcgagcgcgaggaatggttcgaaaagaccgcggagtgctacggtgcgcacgaccaagagctgccggcgcaaaccgaggtgttcggggcgcttaacgacatgatgggcgacaacgatgtggtgattaacgccgccgggtcaatgccaggtgatttgcagtgcctatggcaggcaaagactccggtgcaataccacgtagagtatgcctttagctgcatgggatatgagattcccgcggctatgggtgtcaagatggccttgccggattcggaagtggttgcgattgtcggtgatggcacctaccagatgttgccgatggaactggccaccgtggtacaggaaaacatcaaggttatctatgttttgttgcaaaactacggattctcttcgatcggttcgctatccgagtcgcgtggctcccagcgtttcggtactcgctaccggatgggtgatggcaatccccataaccaggacggggaactgctgccggtagatattgccaagaacgcggaatcttggggtctgaaagtgctgaaagtgcacacgatcgaagagttccgggatgcttatcgccaggcagagaaatctgagcgtgcggtgatgattcatatcgaaaccaacctgtttggtccgaacccgccgaactgttcttattgggacgtagtggtgccggaagtttctcgtattgaatccacgcagcaggctcgtaaagaatacgaggaagcactggtggatcagcgtcactactggaaacagtaaatagatactatctagttaatagtgaatgagttgggctaacgcccaaaagttccggggtggggatttatttccccaccccggaactttttattaccagctttttgttgttagaagctatctgtctgcgctggtgttggttaaaactatcggacgattccctaggcgaagggttgtgacttttcgtccagggtcgcaatcgcttccgctggtaggctcaggctggcggaagccaccaggtcctttagctgctggggattacgcgcggaggcaattggggcggctacgcccttggcgcgcagccaggcaagggaaactgccgtgggcgtagattcaagttctgcagctacctttactagggcatctaccagctcaaaagattcgggtcggttatattctgacaggaagttgctgcgctctttgccggcaaggtcttctgctttgcggtattttccggtcaggaatccggatgctagcgagaagtagctgaactccgcaactccgaattctttacaaatcggctggtagctctgttcgaaatctttgcggtaaagcaggttgtattgattttggatcgctaccggtgttgccagattggcttccgcggccacctggaaccattcgcgcatccgctcgggagaaaagttagacatggctacgtggcgcacttttcctgcctttaccagggaatcaaacgcggcagccatatccgctattggggtcttattgtcatcgaaatgcgcatagtagagatcgatgtaatcggtttgtagtcgttttaaggacgcttcacaagcggatttaatattttccggggcgagaccgggaaagtcggggtgctggcttaccttggtggcgattactatctggtcgcgattttttcgttcgctgagccagtcaccgattaccccctcagattctccgccctttagaccttcgccccaggcagagtaaacatcggcagtgtcgatgaagtttccgcccgcctcgcagtaagcatccatgactgcaaacgaatcagctttatcactggtccaaccgaaagtattagctcctaaagccagttcaaaaactgaaagctccgtgcccttaacctgatacattcttcctccaaacgcatttgtactgtcaattgacatgatactagatggctccgagttaggggcggccaagtatgggagccaacaagagcctctcgcaagccagctgtatagcggtacgttaccggaagtatcttccagaaaatcggcgcagctataacccctagaaggtggcggtgtcgattacgtagcggtagcgcaccttagcggctaccacgttgtcccaggcttcattgatttgctcgccggaaatgatctctatctggggcgcgatatttttctcggcgcaaaagtccagtacttcctgggtgagggcgatgccgccgatattggagccggccagcatcttttggctacccaccaggttgcccatggcaaaggactggcgattctcgggcagtcccacaatccctacgatcccttcgggttttacacaatctagcaactgatcgatttccattccgtcagacagggtggataccaccaggtcgaactgggagtgcaggctttcccaagtcccgtcctcggaagtggggtgcagcgcaactgccccaaatcgtttcgcgtcctcttctttcgcgcgagtgcgggaaatgacgtgggtttcggctcccagggcggcggcgatctgtacccccatatgaccgagtcctcccatgcccacgatggcgactttcttgcccggtcctgcccctagccgtttgagtggggaatataaggtcaccccggcacacataatcggggcggctttttctagaggaatcgcgtccggtatccggcacacgtagtcttgttccacggtgatcccggtggaataaccgccggctgtggggacgccgtcgcgcccgatgcagttataagtccagatagtcccgccctcgccattacagaattgttcggttcctgcctggcacgcctcgcattttccgcaggaatccacgaaacagccgacccctacccggtcaccaaccgcaaacttggttactttcgagccgattttggtgacgattcccgcgatttcatgaccgggggtgagggggtagattacctctccccactccgcgcgtccggtgtgaatatcagagtggcagaccccggcatatttgatctcgaagtagatttcggtgggccccggttcgcgccgctctaaggttacggggtggaagggcgaggtggccgaatccatcgcataggcttttacctgggtcattgctgctccttgattgcgaggttgatactgccagagggattgttacttttgtttggggttgcatcttctcttggaagtgctactgcgcgcaggactgttaccgtttgcagtattaacccctgttttccaccatagcttgccgtcttgctgggcgcaggagtggggcaagaacgggaaaataatttttatctgccaataccgtaccaataatggtacgcttttgacaacgaaggggggtgaatgttttgacctatgcgcgggatttgtgggaggtagcggcttataaccacggggtattaaccgtttcggaggcaatttctgccggtgtacctgctgttgaggtgcgaaaattaacgtatagaggcacgctgcgtagctatggtaacggggtatacgtacatcatggggtgccgctcacgcgttttacccagttcgccatagcggtggcgttagctggtaaaggcgggtttttatggggagatgcagtcttttctcttttggaactgggggattttaatccgcgttcgatccgggttgctacccgtagacgggtacggagaaagttgccgcagtggatgcagcttaccgatcgcgttgacattgtggaaaaagatataactgagtactgcaatctgccatccacctcggtaaacgaggcactgacagatgtttttccccaactaccaaatgaaaaatggctggcgttagtgcaggagtgctaccgtaaagattttgttaccgcaaaggaactcaaggctaaggaagtgctgtatgggcggggtcattcctcccaaaatcattgctcaacttgagcaacgactgcaagaagtgtccgccgctcgggggattacggtggcgcgctcccggctaatgctgtctaccttggttgtatcccagatgcttccagagttcacagtaataaaaggcggtatgggcatgaagctgcgcgcgggcgagcctggaactcgcgcgacctcggatcttgatgtttttatctctgagcaaacccgcagattcgaagaagcgctgcgcgttaagttgatgaaaggctggggtttcgtcccgccatcaaaagcacagctacgcaataatccaaacagcgcgccccgaacagctttcacgggggctttggttgctttaccgatccatgaccctggggtgaagctccctcagtatttggtgcaaccgtaccgagtttcattaaaatttcttgggaagcagtggtctgcgctcaaggtggaagtgtcagcacaagagattgagacgagtatgtatgggggtactcgtatagacagtgatttgtatgattttaatgcccgtttcggctttggggagttgaagcctgtaagtttgatttctcctgaagctcagtttgcgcagaagcttcatgcagttactgatctgacatattccagagcccatgatttggtggatctgcaggtgctgtggcgcatgcagctggacttggtggaacttaagcaattatgtgtacgaactttttcctggagaaaagcgcaagcctggccacctctacctttgcgcgatatgagcggttgggaaagtgtatacctggaagcgcgcgctgagactcaggtcaatgatgctacggacatactgtcgtcactttccgatgcgagacagtggctagaacaaactattcgcaccattgatagaacgcaatgaccaggtaatcggaactctaccttgggcttgaagacttggatggctgcaagttttcatagcaagcactgctttctttaggtttagaaaaccccggtatgatctcattcaaattcattaagttaccagggttgagctggtgtgtagattttgagggagggggagggcgtgcggcgagtgtccgcaggcgccatgatcttatttagaagtagtcagggtttctgccactaaaacaactgctagagctggatttgagggagggtccgtgaggagtctcgcattatagaatagaactttccgataattcattaaccatgataaagtgcgtgttgtcgaatggtatctagaggctttagtgctaaggaatctagatattttctcaatagtcgtggggggggggggcgtcctaaccgctggataccggcagtttgagtcgcttcttcccgcataaaccttacgtacgggggagcaatgacaaaagttagcacttcgaaggcggccggctggtcgcttaggttccagaaaacatttggtgcgattttagcggctgcggcactggtacttgtatttttgcccgcgtttacgcccagcaccgctcacgcggatgccccgatttattcccccggcaaagccctgagggaaaaaaagagtgtcagcggtagggtctattttgatcgcgccggtagccgctcatacatggagcctagggataaacagggtgcttccgatggcgacatagggctctccggagttaaggtctatgcgcaatggactgattacaacaatcgaaggcagaaaggctcattgtcgccggtttactacaccacgtctcgctctgacggtacctacgttatccagctgccagattggacagatgcatttgggacggttcacaagtgggaggctttggcaggtcaaaccttgcggatttgggcagataatccagatcccaaaaagtacacccttgcctttgttgaaggcgattctacctttggcggtcagggggaccgctatcggggtctatggaatggagcgattgggtctaatcatgtttatgactacaacatcgctttccaagaacgtccccagattgcgcagatgtttccgcctgaaaacacctggaagcagagtaatcgccacgggggcggcggcgacgttgtcggtcgagtctggtatgaagagcgggaactgttaggaaattctgaagccgttccaacttttaaatctacattgggtgaagtgctaattcccggggttaaggtagttggcgcttatgtccaggatgaagttgcccgccgcttcgacgcgtggaaaaaagcccataaaaactataagcgcgacgagttcaaggcagcgcaacgccagattatgaaagactatgaggctgaaactggaaaatccgcgattgctgaaaccgtatacgacaccacggatgcaaatggtaaatatcatctgcagttccaggggttgtggggagacacctactggcgcaagggaattatgaatgccggtaactggggagagttggttcccccggctgatgataaaaaaggatctccttggacaccgggtaccctgcgcagtcgccacgtaaacaacgactatatgtatgtggctccggaaatcccgaatggtgtcggtggttctctcaataacttccgggacaatatgtaccagaacggccttaactggactccaaatgcgacaactgcttcgatcgcgaatgtggaaaacgtgaacttcgccctccggttggagggacgtgacttccatattgaaacctatgaccagaccacaaatccggcaaaaccgggcgataccgctcctaccaaggctaccggtttcgttccgaacaatacctatgacattgtttggactgatggtgatggtaaagaggtaaagacttgtacagcacaggcatctaacctgggcgttgtggaatcctgccccttaacggttccggctcttcttgacaaagatgagatttataccgcgtctatctacccggagaaaacccgtgaccgggcgatggcgaaagatagtttcgctgccaaggttacgcctgagtataaggcaacgaccattgatttggataagacagccacggtagcggcaccgattaacaaggagaacgctactacgcctcctgctgatacaacttatgccgctgctgctgccagtgatgttcctgcctccctgcttaagggagtggataagaacaaggtgacagttggtgctcaaccctgggcgaaggttaactccgatggcactattgctctgagtccgacgactggcagcgtgaccccaggtagctacctgattccggtcaagttgacatatggaaaagggaaagacgcctttgagagggtgattctggctccggttaccgtcaaagagccggatgctgatggtgatggtactccggatgctactgataagtgtttgaatgttgctggtccgactactaataatggttgcccggcatggggcgacggcagcggcaagcctggcgccgaggtaactctgaataaggatgatgccaatggtaagttgccgaccggtacttcctgcaccgcttctaccggcacttgtactgttggggacgatggcaatattaaagtaactattcctcaggacgctaatgctggcgataagattacggttactgttaaggacggggacaagacctttgatacgtctacggtgactgttaccaaacccgacaccaaggacgacgacggtgatggcatccctaacgattcggacaactgcccgaatattgctggtgtcgccaaaaacaacggttgcccaacctggagtgacggcgaggctgatcctggtaaggatgtgacgctggctaaggatccgaagaatggtactttgccggacacggttaagtgttctgctgataaaggtgcgaagtgttctattgagccggacggtagtgtcaaggtttctgttccgaaggatgcaaagcctggcgataagattacggtcactgttaagaacggggacaatatcttggatactcctaaggtgactgttactactcctgctgatggtgatggtgatggcactccggatgcttctgatcagtgtccgaatgttgctggtccgactagtaataatggttgcccggcttgggatgacggcagtggtgatcctggtaaggatgtgacgctagccaaggatccggcgaatggcaagctaccgaatacggtcaagtgcgaggcttctgctggtacttgtacggttggcgatgatggtaatatcaaggtttctgttccgaagaatgcaaagcctggcgataagattacggttactgttaaggacggggacaagacctttgatacttctacggtgactgttaccacgcctggtgtgaaggattataaccctggctatggtagggcgaagttagttgagcctggtgagtctaagaccgctacgccggtttataccggtgaggagcctccttcggcttcttataagatcaaggttggttggaaggctcctgagggctggtcggtgagtgttgatgctggaaatgggaaggtaactgctacggcacccgctaagcccgatgtgaagaccgctgaggaagttaaagttccggtggtggtttcttacccggatggggctgccaatgatgaaaccagcgctaccttccagcttgatactgatggtgatggcatcccggacgtgactgacgatgacgatgatggtgatggcatcccggacgaggacgagaagggccatggtactgacccgaagaatcctgacaccgatggtgacggggtaaaggatggtcaagaagtcaaagatggtactgacccaaccaaggttgataccgatggtgacggtatttctgatggtggggagaagaaacttggtaccgacccgaagaatcctgacaccgatggtgacggtctgaaagatggtgaagaggccggtaccgatcttggtccagatggtaaggtcgtcaaggatgagaacggtaagccgaaggttgattattctaaggccaccaagactgacccgacggatcctgatactgatggtgacggagtctccgatggtcgagagataaaacttaagaccgacccgaataaggctgacactgatggtgacggtttaactgatggtgaagaggccggtaccgacattggcccagatggcaaggttgtcaagaatgatgacggtactccgaaggttgatgattctaaggcgaccaataccgacccgaccaaacctgacactgataatgacggggtaaacgagggtaaggatgctacctcggataactgcccgcttctagctggcccgtccggtaataagggatgcccggcttggggtgatggttctggtaatcctggctccgaggtgactctgactaaggatccggcgaatggcaagttgccgaagacggtcaagtgtgaggctgataacggagcgacctgtgctttcgataacgatggcaacgttaaggtcactgttcctgccggtgctgcctctggaactactatcacggttaccgttaaggatggtgacaagatcctggatagctccacggtgacggttactaagcccagtgcggatgacactgatggtgacggggttagcgatgagcgggaaaaggaacttggaactgacccgaataatcctgacaccgatggtgacggcttgactgatggtcaagaggtcggaagcgacgttgacaaagatggtaaagccgtcaaagacgagaacggtaagccgaaggttgatgattctaaggccaccaagaccgacccgaagaatcctgacaccgatggtgacgggattaatgatggtgacgaggtaagtggcgctaagaatccgttcaagggtgataaggctgatccgaacggtaaacccggaaacactgacccgaacaatgctgacactgacggtgacggcatcaacgatggtgacgaggtgaccggagctaagaatggtggtaaagccactaacccgaacagggctgatactgatggtgacggcatcaatgatggtcaagaaatcaaagatggtaccgaccctctagatccgaacgatcccggcaagaagggtggaaacaccggaaatagcggcaacaagggtaacagcgtgtggcagaaactccccaagtctggttctgcggggattccggcgctggcgctagggctgctagccgttggcgcgggtgcagtcatggttcgccgtcgtaaacagcagtaaccattaagaacaagtaaataacagtttgggtcgccccttaaaaaaggggcgacccaaactttttgatgttcgccttcctctgccccatgtttttgcgtattaacccccattttggggtgcggacagaatgttggagagtgttttatgaatgtttcgtattcccgagagcagcgtcgtgaggcgttgagggtgtatagacgtacggggtcggtatctaaaaaagatactgccgtctaaggtaactccttgataataactttactgtgcagttccggtagtttttccatggtagcgtaatggaaaaccctatttgccacaatatcggcagctctaatcaaaggatccctcgcagagtcacgcaagcaaaagttcaccccactcaataaaggtagaatcgggggataaaacttatcccactgcagattatatgtaccgattctgtactcagcctctaatgcctctctgagctcataacgaccatcggtagctgttgtgtgctcatccattcgcacatcaataacttccgaatagtccggaggaataacaccttcgcttatttgcgtgacaatagcgtgtttgagaccgattttaaaagcatagtctaagtaacgttgtttactcttcggatgagaaaaaatagattcaagaatgctttgttgcctcactacaaccgcaaacttgcacacctggttaagggaacgaaaaagcctacctttatgagcgttactaagcgtagctgctttcaactcaccattttttgagcggcgagcatttttacctaaatttcgttcagcttttaaatattttctccccatgatgtcacgctgatccttagagtaaagaagaataccgccaaaaacgaaatagtcattatgtaaatggtcaaatacgcccgactcgtcagcgtagacaaaaatactcacagttatattctaatagagccaccccgctgtggggtggctcccccaaggccggcgaccttacagaccgcttaaacgttaattcggttccttgagtatacagcgcactctaatgcctgcatttataaatttaacaccataaccccgctacgccaagtagtaatctactctgtcttaattttggataataatctggcattcatccgcaagtccgtcttagtagcttccaccttagtgggtacgatgtgcagcctgcccgaagttgatgcgagctagtccaaacctaaagcactaaaacctcaccagagaaaactttcggcgagtgcattggcggaggtagggggattcgaacccccgagggcttgcacccaacccgctttccaagcgagcgccataggccgctaggcgatacctccagacacaagtttgagtttaccgaaatgccctagctaatgtcgatttaggaaatgagtagtcgaacacagcccggcgctactgtggctaatcgcgaatgcttcaaccccgccgcgtcctcgccctcatgcccgaatcctcatttctctcgctcccagaaaagcgtccgcaccgtattactctcccgtttccagataccgcgctcctgggctaaactaggagggatccttcacgcggcgatatcattcgaacctccccagggccggaaggcagcaaggataagggtgcgctatcgggtgcgtgaagggtcttttttatcccaataacccggcatacaccccggagatggctgggctttagtacagtagagccgtgagcatcgcactttatcgccgctaccggccagacactttccaagacgtgatcgggcaagatcacgtggtcaaaccgttgatggcggcgctgcgttctggacggattagccatgcgtatctcttttctgggccgcgcgggtgcggcaaaaccacctcggcgcgaatcatggcgcgctgcctgaactgtgctgaaggccccaccgacactccctgcggcaaatgcgaatcctgcaaagacttagcgaccggaggctccggctccctcgacgtagtagaaatcgacgctgccagccacaacggggtagatgacgcccgggagctacgcgagcgagcaggtttcgctccggtgcgtgaccgctacaaaattttcatcctggacgaagcccatatggttactcaacagggatttaacgccctgctgaaaatcgtggaagaaccccccgaacacgtaaagtttattttcgcgaccaccgaacccgacaaagtaatcggcacgattcgttcccgcacccaccactatccgttccgcctagtaccgccagaaatcatggaaaaatatatggcgaagctctgcgaggcggaaaatatcgaacctgcccctggggtgctgcaactggtgatgagggcgggcgcaggctcagtccgtgactcgctttcggtattagaccagctaatggcgggtgctgaggacggaaaactagcctacggaaccgcctctgcgctgctgggatataccgatagttccatcctggagcgctcggtagatgcgatcatcgaccgggatggcgcggctttattcgaggtaatcgcgaaaatgattgagggcggacatgaccctcgccgctacctggaagacctattgcttcgcttacgtgacctgctagtactctcagtttcttctcccgaggacgcacaggcagcgttggcgggcacccccgaagatcaactatccgtcatgaacgcgcaggcgcagcgatggggaactgccgggatttctcatgccagcgacctcaccaacactgccttgacagaactgaccggagccaccgccccccgtttgcaagtagagttgctggcagcgcggctattgctgccccctgaaaacccggtggcaatagccagcggacagggcgctgtcccagctggttctcgtagcggggcagaggcagcaatcgcggccttacatcgaccggggcgtcctcaatctcaaaagagcaccaatgctccccgaactaaccacgccgcgcgcactgttagcgctccgcgacctgccgctaatgaagattccagcgttaatgccgccccggcagtatctgctgctagcgcgcagcctgtcgccccgcgaagcagcgtcccggaactcgcagcccctcgtcccatgacagcggcggacaaacaggttgcgcccgcggttgcgggcaccccagaacagtcccaagaaacgcaaactaacagtaaaaatgaagggcagaccgcggctgcagctcctaaagcagacgcgcagccacccgtggcaacgaaagtagaaaaaggtgaacaatactggcaggtattgcaggcgtggggcaaagtatccgcgcgactgaaagaggtagatccgcgactgtggtcgacttgtaatcggcacctgcagattggcggggcacaagagcagaaagttactttgctagccgatagcccccaaaccgttgagtatttaaaagacaaattagctcccttagaaaaatgtctagctgaggagctttcgggaagctgggaagtaaagctgctccccggaagtaatgatagtctcgctcccgcgctcagcgaagcgttatcgcaggtaaaactattcttaccgccggaaagtgcgcccgcggtcgaggatgaagccccgccggaagaagaactttatcctccggaaccagaagacttaggcgatagcggtgggggtgaaaccccgccctccccggtggatagtgcgccgacggcatccctagaaactaccgcagacccggaaattcccacccctaaaagcacagatgaagctgtaaaaaaagttaacccggtaggggatcaagatggctctgcgcccagcggtggtagctggattattgaccctgccgcgcccactgtggaggaggtacctcccgaaatccctgatgcgggtgatatggagcgccaggaggctcccgaactctccgcgcctcgccccgggaaagaaatcgttgcgccccgcgctgaggaagaaatggttgctccgcgggcagtaagtccgcaaacacaagcggaggcccctcgggctgaggtaaacgagactctagtggctccccgaaccgggaataatcctattgcggccccgcgtcctcatgaaagtgctgctcaagtggaaaacccggccgcagaactccccgcagagcccacaatcgaagaagacttaccggatatgtccgatcctgatgtgggggtcgatgatagcggtggccgctggggagtcgaggtcgcgaaatctttgcttggtggcaagatagttgagacagcagataacgattccgccagcaactagaaagagagcagctaaaaatctatgtacgacggtgccttgcaagacctgattgacgccctgggacgactgccggggattggtccaaaatcagcgcaacgcatcgccttttatgtgctttctcgtcctaaagatgaagcgaaactactggcgcaagccttaatggatgccaaagaaaaaatccggttttgcagccagtgtggcaacatttcccaagaggaactctgcacgatttgccgtaatcccaaacgcgatcagtcagtaatctgtgtggttgaagaagccaaggacgtaggcgcgattgaacgtacccgcagctaccgcggcttatatcacgtgttgggcggggcgatcgatcccattaacggaatcggaccggaacagttacgtctgcgtgaactgctaaaacgcctcagtggtgcgactgtacaagaaattattattgccacgaatcccaatatcgagggcgaggccacggccacctacctgacccgcacgatttctcccttgggattaaaagtaacccgcctggcttcgggactgccggtaggcggcgacctggaatatgctgatgaagttactttagggcgggctttagaaggacggcgcagcgccgaatagccgatattttccgaacagctaataccctggcaaaagtcccagacaggtgaatatcagcaaaattaatagtgtgtgtttgcttaccgaccagcaaatttgagacgctaggacttcgattaagctatcttcctacaattgcagaagatagctagatggaaagcagatatacaaggggaacaaatggcgctgattgtacaaaagtacggcggatcctcagttgccgacacccagtcgttgcagcgggtcgcgcgacggattgtgcaaacccgccgcgccgggcatcaggtggtggtagtggtttccgcaatgggggacaccaccgataatttgattgatatggcggcagaactaaacgcccacgcccctgcgcgggaaatggatatcttactttctgccggggaacgcatctcgatgtcattgctgtccatggcgatatctgcccagggagtaccggcgatggcgtttactggcgcccaagccggaatccgcaccgacgccaaatatggcaaagcccagattgtggggatgataccggagcgaatcgcccgggcaatccgcaagaacaatgtggcaatcgtagccggattccaaggagtaaacgatgccgacgatgttacgaccttagggcgcggcggatctgatactactgcagtggctctagctgcggcgctgcacgcggatgtatgtgaaatctataccgatgttgacggcctatttaccgccgatccccgggtggtgcctaccgctcgccgcctgcactcccttgactatgaagaaactttagaactggcggctaatggcgccaagattttacatctgcgcgcggtggagtttgctcgccgctaccgggtgcctctacatgtgcgttctagtttttccgacaagaacggcacctggattgcccggggaccagctccgaaatcattgcagggaatagttcctgcggaagctctcgaggaggaaaaagtggaagctccaattatttctggtatcgctcatgaccgttcccaggacaagctgacggtggtgggactgcctgaccgtccgggcgtggccgctgacctgttcgcagcggtggccaaggctggtgccaatatcgatatgattgtgcagaacatttccgaggcgcggcccggacgtgcaaatatctccatcactatgcccgcagaagatatttccgcggtaatcaacgagctcgagcacgaaaagcaggctttggatttcattcgcatcgaccacgacagcaatgtggggaaagtttccctggtcggggcaggtatgcgcaataatcccgggatttcggcgcgcttcttccaagccctctctaatgaaggcatcaacgtagacattatttccacgtccgaggtgcggatctcggtactcattaacctggatcgcctggatgatgccgtcctagcaatccacaaagcctttgatctagattccgaagaaactgaagctgtggtctatggaggtaccggacgatgattaagcaattaactgtagccctagtaggagcaaccggccaggtagggcgggtaatgcgtaccctgctagaggaaagaaatttcccggcagctaatattcgtctgtttgcaacttcgcgtagcgcgggcaagcagctttctttccgcggtcacgaagtaactgtcgaggacgttgaggtcgctgatctgagcggtattgatatcgccattttttcggctggcggtgcagcttcccgcacccatgctccccgtttcgctgctgccggggcggtagtagtcgataactcctcggcttggcgtaaagacccccaggtgcctttggtggtttcggaggtaaatcccgaagatattaaggatcgtcgcaaagggattatcgctaaccccaattgcaccaccatggcagccatgcccacggtgaaagtgctccacgacctgtttggattggaaaccttagtggcgtcctcctatcaggcagtatccggttccggaagagccggggtaaaagaactttcttcccaactagaagccagcgttgaccgctgcgaagaactagccttagacggggcagctatcgagtttccgcagcctaaaacctatgtacgcccgattgcgtttaacgcggttccagtggccggaaacttcgttgacgacggttcccatgaaactgatgaggagcaaaagctgcgtaacgagtcgcggcggattttgcatatccccgagctggcggcctcctgcacctgcgtacgtatcccggtaatgactgcgcatctgctgtccttgaatgctcgctttactcgcccggttgatttagaacaggcacaggcggcattagagcaggctgagggagtacaactggtagatgttcctaatcctttggatgctgctgggcgcgatggtactttcaccgggcgtctgcgcatcgaccagtcagttccgggtggcaaaggtctagccttcatttgctgcgccgataacctgcgtaaaggggcggcgttgaacgccatccagattgcggagttagtcgcccaagaactgctggctgcctaagttagctgctttttgctttaggctgataggcttcggcgctgttaatcgtcagtttcagcccgtttccggtctgcaggttccaacagtcaaccccagatcccgaggactggcaggcataggctcccgaggcagcggcggcaccactggcgagaactgtttgtgaggtttcccggtcttttacccctaaatcttccggggtcttggcgccatcggctcccagggtgaacttgactgttgcccccggattttgcccgatatttccggtaaagctaaacgcggtgcaaaccacttcgctaccgatagtgcatttaatcggggcatccggcaaagagaattcactgacctggtaggcgccatcgggtagccctttggcttctccaatggcgctggtgggagcgggcgctatttggcgaccctcggtttttacgtccagttgcgctcccgcattgttcttgccgcttttaccacctttaccagctgatttaccgtctttgccgttcgccgccccattttcttgggcatcggggattccgttattattgcgatccttattcaggtccgaatccccgaaaatccgcgcaatcaccccgtttttcccgtaccaactcttggagccgtcaccgccggtgagccgatccgctagatttcctccaatcgaaagtaccagcccgataagcacggccacaataatcacgaaaatcttgcttttcttggaggcagttttttcttcctgtggggaaaactcctctaaatcagcttcatcagctagttttagtttttctgctttggttttttgggcagctgtggtctcgggtgaggcgtcagcgcgcttctcggttagtggggggaacttggctttgggggaggaggccgcgggttcgggactagccatatttcttgttggctcggtttgctgaggcgaggtagcagccgccaaagcctgggtgtcgtcggttgcttgcgcacgctcagatttagcggcaatctcagctggtaatgccgctgacggtgaggtttgcgcaggctgcgggctttttgtggaagcaggctgcgcgctttctaagccggcggaagccagtagagctttccggcgggcagcccggttgatgcggttttggcgtcgctgtaaagcggccgcgatttcgggatcagaaaattcgcctaaccactctaaaagcgctggataggtggagggattttccgcgataagtggacgtaaggagggatgattttgagctaagctctgcagctcttccagcggcgttgcgggatcgcttgcccgctcgaccgggtcagtgctcatagtgcctcctttagtttccctctagcgattatagatgactcggaggcgaaaacagtttccgcgccgccatagttgccattgccagaactactagctgtctcttgcgctggaaacagagtctaaggtgggagaaaaatcccgacttatctgtaaagaaaacaaagggagtttaactggcacggtggatggggcaggcagaagtcgccattccttcgtcgcctcgagcagagaaaggattttcatccatatctaaggggcgacctaagaaacgtttcgcactgggtagcggcgcgattttatggtcagctcccagggagcgtagtacgtaggcttgcacgcagtggatcaaatattcgcggcgcatcgggtctttcggtagagatcttcccgccaaggaggcattaaccatagaaatagcaatcggaagattctggggagggagcgtgccctcgctgattgccctacgtagaatctgccgcaagatattttctacgatgcgtgcatgttggcgcagttcagaactggtttcatgcgatacttgacggcgcaaatccagtccgggagccagatgataggacgatcccagggtaagttgttcccgaatataaattcgcagcatcttgattggggaactaactccctccaatgcgtggtttaaacgcagcgaatactgtccagtttcataggtgataaacgccaacagcagcgcttctttatcttggaaatggttgtagaccgcggtgcgtcccaccccggcttcttccgcgatcttcgccatggttaatgactcgaaagtgctggtctgcaaaagacgtgatagtgcatcaaagagttgctggcgggttttcttacgatgttcttccagcgtttccccgatgattctaggcataagaccattctttcatttagtgacacttttagtctaatcgtcttgaaaaatggggtggtgagggtggtaacgagggggattttaaagatgttaacggattgggaatgctggtaattttaatcggggaggtgcacttgactaacttactgctggcactgatttatctcgcgtttatcagcttggggctgcctgacgctctgctgggttctgcctggccagcgatttatccagattttgaagttacggtttcctacgccggcattgtttcagtgattatttctttaggaaccatcgtttcctccctactatcagatcgtttgatatcccgactgggaaccggaaaaattacggtcatctcagtggcgctgactgcggcagctatcctcggtttcgggttggcacccaatttttgggtgctgtgtatctgggctattccttacggactgggagcaggcagtatagatgtggcgctaaataattatgtggcgctacatttcaagagtagtcatatgaactggctgcattgctcgtggggaattggagccactatcggtccttacattatgggagcggcactttctggaggtagtggctggcgagggggctactggtatgcagcctgcatacagctggccataaccgcgattttgttcctaagtttgcccctgtggaaacgccgagagcaagccgattctgccgctgcccgaagcagcaaaacggatccgggtgcagaaaacaatgcgcccacaactgtcgaggaagtgctggaaccgacagtgcagcccacgcagtctgggtatctgaaactttccgaagtggtacagatttggggagtgaaagccatgatggtctgtttcttctgttattccgcggtagaacacaccatcgggctgtgggcggcgacctacttgcggttgtttaaaaatatggatgcggctgcggccgccgccttcgctagcatggtgttcttggggataaccctcgggcgtgccgtcagcggttttttggctatgcgttactcagatcaacagatgatccgtttcggaatgatactgacaggtttggggttactaatcctgattatcccgggtccagccacattggcagtgtgcggaattatgactatcggactggggtgctctcccatttacccggcgatgatccattccactccgcagatttttgggagggagcgctctcgggcaatcaccggggtgcaaatggcctgtttctttgtgggagtcctgataatgccgccgctattcggtatagtggctgatcatttgtcagtggggttgctgccagtatatttgagtatcgccctggggttaatggcatttatgcagtaccgtctggggcgactagccgatgtttaagcggtttttcaagctatgttttgctgccggatatctagcatcctgtttgcgcaaatatgcttggggatttaggaaccagagaatccgtgaatcgagtcgaattagggttgtgggtcaggtaacattttttatgtctaagtatttgttatcgcaatgacgctgtttatagcaaagagaaccaaaacgcctaatagaaaagagttggcaatgtcccaaaaaagctcccctcccgtcctcagtgaagaatctgaagaaaaatccgcgatagatgtgctggtagaggaggcgctacaggcgcttaaggattttaagaaactcgatcagcaaaccgtagatctgattgtggaaaccgcagcccgaaaggcgcgggaagcccatgcggtgctggccgccgaggcggtcgcggaaaccaagcgcggaaacttcgaagacaaaacggtaaaaaatatctttgcctccgaagttatcgccgatgacttggaaggacaaaaaaccgtaggagttatttcccgtgatgagctctcggggattgtgcaggtagccgaacccgtcggggtggtggcggcgctaactccagtcactaaccccacctccaccactatttttaaggctctgatctgccttaaaacccggaatccgattatttttgctttccacccttacgcccaagattgttcggctcatgccgcaaaaattgtttacgaggcggcgttggaagccggggcgcctaaaggctgtgtacagtggatttccgctccctctatgcaagccactgctgacctaataaatcaccccggggtggcagttattttagcgaccggcggtaatgccatggttaaaagcgcctactcatgtggcaaacctgccttgggggtgggagctggaaactgccccgcctacattcacgagagcgcggtagtgaaaaacgcggtcaatgacattaccatttccaagtctttcgacaacgggatgatctgcgcatccgaacaggcagtgattctcgatgcctccattgctgaccaggcgctggcagagttcgaacatctcgggtgccatctggcaaatgcaaaggaaaaagagcaactggaagacttgctattcggggcgcgcgccgggagtgaagaatgtaagaccgccaagttgaatgcggcggtcgtggggcagagcgcagcaaaaatagctgaaatggctggatttagcgtacccgaggatacccaggcaatcctagtgcaatgcacggaagtgagttatgccgaacccttgaccagggaaaaactctcgccagtgttagcggtgctccgggcagaaaactccgccgaaggcatcgaattgtctcgccaaatggtggaacaagacgggctgggtcatagcgccgccattcactgtcgggatcgtgaagttattgacaagttcgccaccgaagttaataccgtacgcataatagaaaattctcccagttcattcggagctatcggcggactttataacgcgatggtgccctccttgaccctaggttgcggctcctatggacataactcagtgtcgaacaatatcagtgcggtgaacttgctaaatatcaaacggctagccaggaggaacccggtaatgacgcctttccaaatccccaatcaaatctatcttggatctggctatatccggcagctagccaacctggagctgggaacgaaaattacggtgattaccaaccaacgtgccgccaatagcggacagttggatgtggtgatgcagctgctatatgcccgcagtgaaaaaatatctgtgcaggttatcgaagatgtagaagctcatttcactaccgagtatctaaagaagaaggtgcgggaagtttccggttacggtccgcagacgattttagccgtgggggagcgtgacgtcattaatgtcgctaagttcttgcggctgttggttgcttgcccccagctgccaatcaaagaggtctgcgccgggcatattgcgctgccttctctcattaattcgccgcagctgatctgtgtgcccactattaccggaggacgagcttcagtagcaccctgggcagcgatcaccgatgttaataccggctttgctcgtccggttaaatccaccgcttttctaccgcaaatcgtggttatggataccactttggcggtctattcccgaaaagataccctgcagcgcggtttccaagcgatcgcctatgggatcgagggctacacttctacgcaggccagcgaatataccaattctttggcgctgcatggtctagaaaatgtctacaagatcctgccccaggtagttagcgcctcggagaacagtcaagaattcattgatctgcgagaaaagctgattgaaggatcattcttgatttcaactgcccaggcgaataccactatggggttggcagattccatcactaagactttcgcggccgtctttggaggacgcgctcaggactatttctcctcggtactgcccaatacggtgcgtttcttaggagggcatccccgaaagtttgtggcttcccctaactacctgcgattccaggctccccagcaattagctgagatctgcaggcggctggggattagcgcccaggaagataacgcaggagaggctctggcgcaggctctagaaagcttagtagtcgatttcggagtgccgctaaaggtgcaagacttccaggtatcggaagccgatttcttggagcagctgccggaacttgcccaacgcactttcgatcgagagtcctataccggtactccacgtaaagccacgatagcggaagtagaaaatatccttagagcctgctactacggacaagaattcgtttcctagttcgtttcctagcagtaaaaagcctgcggggcgttactttaacaccccgcaggccttgccatgctgtccttagttctaggatgatcctttcctagagggtaggatcactctcgcgtaccttagcgacctccgcctgagtaggagcataggcgcctaccttgcttaccgtaatccctgaggtgatagttgcccggtgcagggcgccttcaacatcgctgagttgggcttgctgtagtcgctgtttggcttctgccgagcccaatagccccgcatccagtagccccgaaatcagtcccgccataaaagaatctccggcacccaccgtgtctttgacctcgatatttaggggatcgaccgccaacatatcccggtcattggcgcacactgcataggtagcccacggcccgcgggtagccacaatcagacccggccccatagctttccatttccgcaacactgcctctaagggagtgtcttcgccatagagccaagcaatatcctcgtcactggctttgaccacatcggctaggctgatcagttcttcaatccgcggccgtacctcttcgggggtacccatcaaggaggggcgcacattcgggtcgtagctgacggtgccttgagccgccattgccttcactgcctcggccactgctgaggcaccgggtgccaaggtagcggcgaaactaccggtatgcaggtggctaagagcagaaacttcgggcagggacggaacttgccactctaactcgaaatcgtaggttgcttgcccgttatcgtcgatatgggcgttagctatcggagttttctgagcgttagcgctgccagggacaactttaaccccggcggtggctaatttttcttccaggctctttccacgcgcgtcctcgccccaccaagaagctagggaggtgggatgccccaaactggctactccacaggcaacgttaaagacgctgcctcctactttttcttcaatgtttcctgcacgttcaataacgtcgatcagggcttcgcccaggcaaagtacaggatgatcggttgatttcatttctgtcatggtagttactccacacctagtttctcggacatttcttcaagcggaatacccttggtttccggcattactttcagtacccacagtagctgaccgcacatacacaggaagaagattaggaatgaccagccgcccccgaggaacgcaatcatagaggggaataccccggaggtgattgccgcaaaagtccagtgagtagtcgaccctactgattgtccggcaccacgtaccttgttcgggaagatttcggagatgaacacccagataactgagccttggccgaaggcgtgcgcggcgataaataccagcaaaccaatcaaaaccagcaccgaggaaccggaagtaaagttgccctcaaagcggaacatcacgaaggttaagaatcccaagctgattaggtatccgaaagagcccaccagcattagcgtacggcgtcccaacttgtcgattaccgtcaacgcggtcatggtggcaaccaagttcatgaatccgaccgcaatcgacatcaggtaggaggcgttttcgccggctcctgcctcttgcataaccatcggtgcatagtaaagaatcgcgttaatgccggaaagctggttgaaagcggcaatcgcgatcgccatcagcattactttgcggtaacgcttggagaagaaattaactttggtcttggactgttccaagtcgcgctcaatctgctgcctaatctcggtcagctcctggtcggactcctcctgggaggaacagagtttcaggctaatagtttctgcctcatcatcgcgtccttgtgccattagccaacggggggtttccggcaccgtgaatagcaatagcaaaaacactatggagggaacggccataatcccgagcatccaacgccaagcggtatcggcgggggcaataccgcgaataatggcattggaggcgtaggccaccaaaatgcctaacacaatattgaattgcaccaagccaaccagacggccgcgttggcgggcaggggctatttccgcgatatagatgggggcgcacacgctggccatgccgacgccgacgcctcctaataatctagaggctaggaataaccaataggcagaggcaggtgccagggcggtccctaggctgcctaataggaatagagcgccgatagcgaatagtagcttttttcgtccgtatttatcggccagacccccacctgatagcgcaccgacaatagtgccgatggttgcagaggcgacggtgaaaccgagcgactgcggggttagctcgaatactttttctaatgcgtgagtggttcccgaaatcactgcggtgtcaaaaccaaaaatcaagccgccgacagaggctactacggcactgcggatgaccagaccattggcacgagagcgttccagggtatttgtctcgctggacatgatggttcccttcgtctgtggttttccaagagaaaaactttgtttttgtggtattactgttggattgtgagtattcaatcgttagtaatgccgtattgatataatattcccaaagaatgccacaataccaggaaataaaaaatgtgaggtgtatattacttttttgctggaacattcgctaagtaattcacgatttcttgcgggcgtttctactttttctccctgcgtatacaagtttccgcccgcgctcagggcactgttatagctcccggtaaccctgggggggggttaccgggagcgccgttagcaactatttagactaagcagcagttatctagagcgagtggctacttttgtaactcgtcagtggtaaccatgaagccttccactggcagctggttgcggacaatcaataggttgttggtgtccgcaggaagggtatattcccaagttgcctccgccggtttatccgtcccgcaggccactttggttaactgtcctttccggtcggaactgctctcatcgctgtccggagcaatccacacatcgatagtggctggttttaccgtctggcaatagaaaccaattttaaatttactcccggctttccagtcgccattgtggttgagatataggctgtaactcttgatttcatctttgctaaagttcgcgaaagtcgggtcaatgttaaatgtctgaattccctttttcgcggcaaattctttacctttatccttccactttttcgctagggcttccgcatcatctacctttacctcttgctgtttttcctccggctttaccacattctcggtggtggatatgagccccactttcgtttcgggggctttaccttccggggtagccttcttttcccctccgctccctccgcccccgcaggcagacaagctaatagctagggcgaatgcaaccgctaaggcaaataattttctcatggtggttccctcccgttatcaagaccggtggagttccctcgccccactaacctcaaccctaggaaggtagctagcgtaagtaatcacccaaaagtacgtattttttgcctgctagttagtgggaacgcggcaggcgcgcccgcagggtaaaaccgggggtagttacaatcgtcaaggagccgcccgcagattccaaacgagcttccaaaccgctcagaccggtaccgtaagccggagtagtggtgaccacccccggattggaaacttccagccagtaactatgggtgtcctcccacatacgcgccgtcatttcggtggaggtggtgtggatcaatacgttggtaatcccctcccgcagtacctgcacaaacaagagagcgcgattttcttcgacaggcaactccccagaaatgttcaaatctagctgcgcggcggttgccaagtcctgcaaagaatccagccaaaccgttgcgggaatcattgcccggtcatggcttaaatcagtaggtagtttcgccagcagagcctgcagttgtgccagccgctgatcgtctgaaaccccatcctctaagaaacggtgtacgaaagagatccgctgggaaacagtgtcgtgaatagaggaacgggttcttaacactagacgcttggtgagggcttcatcgaggcgagcggtttcctgggcaagctgtttttggcgctcttggaaactgtcaatttcatctgaaagttcctggctcaatgacatatatttgctaacgtccagggcaatcaattgtgtcaaaatgtgtcccttatcagccagttgggtgcgattaagcatccaggttcgcccctggggggcatttatccggaagttagccggggtgtcggtagttgtttcctcctcgttggcaccttcagtagtggtgtaagcaggaattattttgtcagttgccagctgccggagttggcttgccaaagtgtcgtaccgagtcagagaagtcaggtttaaggtatctagtaacctttccatgctggaattggcgagcttattgtgtcctcgggaatcagaaaatagtaccccgtgttcgggacgatccaaggcttctttgatgctgaaaggactcaagtcgtgctgcagcagttgccattcgcgccacacctggacccctagccaagtggtggaaaaagttccggcagctagcagcacccactttcccccaaaccccacaatgggaggaagtagcgcggttaagaaaaccagtaaaggcgccgctgcaaagcggtaggtggtcttaaggagcgccaatcccaaacccaggcaaatcactacaaaccagccgaaataataatcgtagaggacaaaaattccggcttgcgagttgataatagtaaccgcaaatccccaggtgtaaaaggacattagcaccgccacgctcaataggaatccggtggctaaggggcggcggtgaataaaccattggctcatcgtcaataggcaggcctccagggaaccgataatcatcagggcggttccggcagctaacagagccggtgaaaggctataaaataaggcactcactgactctgctccccactactgtcttcagggtcaccggcagcttccgaaaattcttgattttccgcgctgggcggtgctaagtcattagcgtcctcattagggcttttgagtagcatctgcagattgactaccccgtcttctatgattagtttgatttttgctcgcggccaatccagaagcggctgtaaaagaccgatttggctaacgggaatatctaaaatccagttcattttggccggctgcctgccggagctgaccgccagatttatgaatactgctaaatccggcagactcaccacgcaccccaggccgcgatgcagagcttctaggtcccaaagtgcctcctctagacggatacttccgctggtgggaccgtgcaagcctgctaaagcattggcgtaagaaaaatccgtacaagactggcttaacaaagtggttaaaacgttgaccgaaacctctccgttctcaaaataggataaagtgagcagacctgcgcgtttagcgtagccgagatccatttttatgctgcgcaaaagttcggcaagctgattgctatctaggtgactgcccagccgggcgctattggattgcactcggctcagcgcattattcatcagttcatcgagccggtcgtaaagcagcggcgcctgggagggctgttgcacctgctttaaggcttcatattcggaggaaagtaccttagtttggtgagcctcccgctctcggagggcagccaaggttttctctaactcttgaacggcgctaatatcggtttcccagatgacgtgtccggcgtttatgggctgcgcctgacagtagagagtacgcgggaatttaccggaattatcggttatcaacaccggggtgttagtttcccgcagctggcgtttaaccgaatcgttcaggtagagagggttggaggtgacgtagcggggttcccagtcgcgatcgacgatttccatagggacggtagatttcttaaagaaccgagtgtaaccccggttttggggaatcagaccgataaagaatagtgcctcccaggccaataagaaaaagatgcagtagatttgcacattttcgctggctctaaccaggggaacccgccaggtgtaggcgagcgagtaggtgaccgcaaaagcaaaaagcacccctaacgccgctaataagcgagtgcggttgcctttgaaactccacagcgccacgtaaagaatggcggcgaacagcagcaagactgaaagataataaaggtaatagccgggaccatatttatagtccacccaagattgcccccgaccaaagcgcaacagcaggtggtggaaatcgttagtaaataccatcaacattagcgccgtccccagcgctactataaaggcgcgcaggctacggtaggcgggtggtaggcggcgcgaggagtgcgcgattacaaaaaataggatggtcaaggtcgaataaatcggaacatagtagtagtaccaggcgtaacgctcgtagactcccggcaaagagtgcttgattatgcgcgctaaaatccacagtgcaagcaaactggcttgaatcagtaccgctcggcgaacatagggggagacagtggtccaaaagcgccaaccggcccaaaaacttagcaggcacagcagggcgatgaaggaaccgatttggtaggcctcgttggtgtttttccactcccaagaagcgccaaaagtatcattggacaggctttgatcccaggtgaactgcttaaactgttctaagttgtcaatcggggtggcgttaatatttttttgaaaagacgctgacaaagagggataggcagcgggattcaggagatcagtaggcggaggtagcaaccggaaatctgggctgggacctccggggtgccgcgaccaaagcccttccataaaggtcactgtagggaacttggcgtagtttagcttttcggagggggaactggcgacgctgcgattatcggtggtcaggcaaaagtagccatgagcaagggcgtccttcagctcttgaggggacgatccggttgctagtcgtccctgcgcttgaagttcctccaaaagctgggaggcctgctgggaggagaaagcttgtgcgccctcgctgccgggggtagtcgttagtgccaaggcgctcagcagttccaggcgtcctactccttggtctaaataaactttttctttccccgaaagtagtttctgaagattattaaccgaggcaacctggggattcggggaggctagaaccaccgattttgggtaaagcggcatgaaagaggcattcggctcggcggttatagcggcgtttgcggtggtttcggtggtgattacaaagtttgccccggaacgcagttgtcgcaagagcgaccattcactgtggggctcgaccgctaaaccctgggactgaaaaaactgggtcagacgcggatcaaaatcattagggaccgccagggtattgctggcttggaaagaaactgtacgtaaaggaacaaaaattaaggtaagtaccgccacccccaagagcagcgcaaacaccaaatgagaaaaccagtcctggatccaggtagaccgcaccgattctacggcaggggaactggggaagcgattaggaggacgcttccaggtagttgcgctagccatagaaactccgattttaggcgggaaaatccgggtcagagcggttttcttggatggcgacgtagccgttagacactgcccataaagctaggcgcgccaccgaagaaaaaccacttttggctagcaattgggagatataagacttaatagtgttttcgcttaagaacattttcttcgcgatttctttacgggggtacccagcgcataccagtcttagcacctgcatttcgcggtcattaaactggttagccccaaaactaggtcgagcgggggagtcggggaaactgttttccccttttatggtggcccgcaatagagtcagtaaatccgaggtagagatatttttgtaggtaaaagcgtcgactccggccgtctgcgcttcctcaacgaatgaggcatcaggcatcgccgtaaacaccactactttcacgctggggtgtgcggctttgaacttggcagattctttcaatcctgaagagttctcggtaactacgtccattagcaccaggtctgccggatgtaaacgctgggaggcgtgaatatcggcggcatcggagagtttatcgaccaccataaaatctgcttccgcatcgatagcagcagctaaagaatccagcagaatggtttgatcctcaacaatagtgatccgcgtcaacggctcgccctcccgtgcctccccccgccattggaggtttcgctgccttcgttagaactattttaccaaagcaagattgtttattggggcgggtagagaggcttttcctggtgaccagccccggccgcatactgctggatccccgggtatttcctagaatttgccgcctccagaactaaacgaggtacccccagaactaaaggaaccgctgctagagcttccgcttttcttcggtcgcgccacctcggtgacataggagttcacaaagacttcgttacctccggttatctggtttgatccggcaacaatatagctagcggcgccggcttgttgctgggcggtgtgatgtttgcgttcaatccgccgcatcaccccatacccgcctgcgccgccgagtcctagcgccactgccagcccccaaagggtggactccagggtcatccgatagggtaccggatgattttcgttgtagggagtgccggccttccactgctctaagtaatcagtgatttgctgcaggtaaacctccatgcccccgtcccagtcgtcgtcacctaggggcttttttacgtgctcatataatctgtcaaccccgtaaggggtgagtgctttctcgccctcgccatgacctaagaaccataaatccctggtagaggggttaataatcatgattaccccgtttgctgacttgagatccagtccgagtttgttcgcgttgtagtagttagcagcgcattgttcgggggacaaataatcgaaatcgtcaactgtgaccacgtagggggctatcccatatttattagctagtgcctgtaactgtttttcccaggcaggaagtttcgaggcactaaaaattttagagtggtcgcgaatgaagggagctgccgcggatgcgttctcttgaccgccctggtactgcacctcttgatcgtcaggaaacttgataatgtcagacaggtcatcgctggcggaagcgagaacgcttggcgcagccgggtgggaaagtgctaccgccgctgccggattaggcgttgctgcctgtgcgttagctaggttcagtcccatcaacgggaatgcggtcaaggcggtagcagccaggatataggcaagtttcttgaaaatactcatcattcaatccccctaatcgagaaaccaaggcatgataaatgggataaataccgatcccactacggcggccaaagcggtagcgatacctattaatccgccccagtacttagctttagaaacggggaaggtacccacgaattttccggtttgaccgttcatggcgtagttatagtttttgccttggaaatccacgttcaacagccagaccggcaagaacacatattcgagctccccgaaggccggctcgaaagctgaactggtcatttttacgctgtcatagccggtaactgagtcccttagaacgtccttggcagaattgcgcatcctatcgagggcacgcgggttagcttcctcggcttctacatcgtatttattggtcataaacccggttaaatatgccggtgaaaaccctacggaagtggaataatcgaacggctctatcgactcggtaagatcctcagttactttggaagtgccggagaccggaacatctagataggcgatattgccgctgcgcgaaacttggtaaacatcatgttcggtataggtataatccgaatcagaccagcttctagtgtgttcacactcgaactcggccgtcccgtaaacgctggcatcatagagccaataggggatatagacaccttgaatatcatctacgctagcgtgctggaacgcattgggagccagcttcaaacgtgatgcttcttttttgaaagcggctagtgcctgttctttggtcatcccgaaaggaatcatccggtcaggaacccgagtacgcaccaactgcccggtggcaacaatattgttgttacaccagggacacttggcgctgaccatgtcgggggagccgatgatttctccgccacaagaatcgcattcaaattgcgccatttgttgcccggtcgcctcatccatataggtgggtggaggctccacccaaccggtttgagggacaggggcaacagcgcccgcgggaggaatctgggcgccctcgctatccgtttgcgccgctagcgttgaatctgcctgctgccccggcggcacctggggtggggccgggggctgcgagcctgccttttgcgcttcgtaggcggcattaagctcctggttagcggcggaaatcccgttaaactgatttacttcttccacggaaaacatggcgccgcaatagttgcacttcattttcccgctgggcacatcaaaattaatgggtgccccgcacgccgggcattttagttgcagatcactcacgattagttcccttccttaataaaaacggttccccagtgccgggttcttagtggcgagcctcgcgcgccagatttgaggctgccaagaacccgggtagcgctggtttaagcgactggagttccgcattcgggacagaattttggtttgggatccggtaggggctttccgcagttggagcaaaagcctccgggggtgggggtcgccggccgtggctgaccgcaatttccacaaaacttgccggtattttggacaccgcactggcatctccaggcttcaggcgaggaaccagcgttttcagccgctcctgcctgctgctttgcttgttgctcagcggccatttgggcttggttggaagcggaggtagattgcatgaagcctccggcggcgttcattcccatacctacgcccatcatggcgactccggctcctgccgggttggagccagcattttgaatgccggtacctactgctccctgtacgaaaccttcgcggatggagggatcttgcaacatggcgccctggttgcgcatatcgatcatcttgcgcgactgttcatcgtaggagatggaggcgatacctacggcttgcacctcaataccgcgctgctcgacccattcttcatccagggcatcgcgcatatagcgggatagctcggtcatatgggactggacttgggagatccgaatcccgtccaggctcatcttgtttaatgccaccgaaaaggcttctaagaattcggattggtactgttctttgatgtcatcgatatgtactcgctccgcatcccgggggatagcttccatatagaacttaatggggtcaacgattcgcagcgagtaagtgccgtgcgacctcaagaaaagttccgcgttatagaaattgtcgaaatattgaatggcattgggagtaccaaactttatgccttttatttcctgcaggtttacaaagaaggctttttgttgccccgagggcgccccaccgaacttgaaacgttcccaggtatctcgaagggcacctttaaaattcccattaaatagcgagggtgcagtggcagaactgtaagtgtaggcgccgggctcggtagaaaagtccacgattttgccggagtcagtaatcagcatggcctgtttgtcgtagaccaagattttagaaccgtccgaaataatggctccggtgccagtattttttcctctaatctgttggccgcgtacaaaaacgatgccttcgcccatgtcctgagcgctaatcgcatctagccattgatcttggagggcgccaccgattgccccgctaactgcctgaatcaaacccatatcaatcttcttttctttagtagtagttgtttgttggctgttcccgctgccggcacagatacctaacagcgggacgcagtctcctataggtgcaccatgctgttttggattgccgttccgattccggtggcgatagacggcaggaaaatcaccaccaggaaaatgatcagcggcatggtcttgggacgggacttaatcagggcgattaatcccaggatgaacgccaccaagttcaaaattgaagccaatcccaagaaaataagtcgcttggtgtctgcagcttgagctgcggcgacatcaaggttactgagggctgcggctcctgctttcccagccaggaaaaatcccaggatgattagcagagaggcgataatcgtcatgattaaagccgccattgccatattcttcttgacgctaggtacatctgtacttggtacgtttgtaatcggaggtcgaccagtcatgatagctccttagggtcggggtaaaacttattcttggtgcagtttttcttctttgaaacctgcattttcaaagtaacaagcaggattttgctaatgaatacccaaaagggtgaaaactatgcgaaaaatggtgaaagctccgggaaaactgcaatagctttcccggagctttcattcttgagatgtttccccgtccttagggcgcacttgttgagttagattctttattccccctagtcattagcgcgttgctgcagcagacgtaaacgccgatgcagggggtggctagcgagaattgaagcggccgtaaccgctaaaccggccagcattaacaggcacatttgggtcaccgaattctcgggggtttgtccggtttgttcctttaacatttgcaccatcggcatagcggctactagtcctaagatgcctcctcctagcacggatactgcaagtggacccaaggtttccagccacatcgagcgcaattcgaagccgcgcggggcgcccattttcgccagagcccgggactgctcggcattttcaatcaccgttgccgcttgggtaatcaacatggcacaggcacaaagcgcgaaactgaccgccaaggtaatcatggctccagtttggaaatcccaacgggtggctgtaataaagttgtcagccaggcgatcagaatcttccccattgaccagtactggcgacatggctacgaaacccgcgagaaaagctaagaaccccataccgctgacgcgccgccaagtagtcttggggtcggccactattcgccgagacgccagtaccatcgcaggaatcggcacctttgccagcaagcgggcatttagttgcaacaggtagggtcccagcaagttaaaccccaaaataactaccaggacaacggcggagactatcgctatcgtccaggtttttgataaccccaaggtcgcctggctgacaataaaagcggcgataaaaatagctaccgcagctaccagtcgccaaatgcgcagcgctggttggctcgctctgcgggttactcccaagggagaaactcttacctgctgcattccccaccaggaagaaagctgccccagcaagataattgccgctagcactatcaacagcagccaccagggcagcagcatttctttaaccgttatatatttggcttctatttcaagaaatgtccaggcaggcagggttgctaaataaagggcagtaccgatcagggaaccgatagctgcttggatcagtgcatctagcagggtcatcttggttacctccgcggaggacacacccaacaggcgtagggaggctaaacgcttttcgcgtcctcgtgcccccaatactgccgctttagtagcaagcgagcttaaaggggggaggatcaaggtgcaggccaaaacggctaagaggaaatagaactttagaatgatttcgaaactcgcatcggctttaagtagctgggcggcaattcccgttggggacatccagcggttataaaacatataggtgccgccggcaaccgttaacgccaatccggaacacaccgtataggccaggattgacgccaaataaagcagagattcaccctggcgagagcggaaacgggctttggtgagatgaaaggttaaccagttgaggttttgtgcgcgcgaggaggttgctgggctggctgtactagtgctcgacatttatgccctcctggattgtggcgctagagcgcgatcggagtggatttgaccgtcccgaatctcgattagacgtgaacaccatttcgctacgttaatatcgtgggttaccagcactaatgctgccccgcagcgttgtgtttctcgggttaaagtttccatcatttcgtatccggtagcttgatcaagagcgccagaaggttcatctgcaaaaaccactttcgggttgccgatcagggcgcgggcgattgctacccgctgtgcttgacccccagacatatctccgggacgccgctttttcagctcagaaagtcccagttgggagagcagttgatctgcgcgctttaaagcttttggcagcagggtgccagtcaagaccagggggagtgccacgttttcgcgggcaggcagctcggggatgagttgcccgtcttggaacacaaacccgaactggctaagccgcagccgggagcgcttcacatctttttgcgccgcgatatcctcgccccggaataagacctttccggattcgggaacgaggacgccggataggcaatgcagcagggtcgattttcctgacccagatggccccatgattgccaccgactcgccctcgtgaatttggagagaaaccccggagagggcgcgaacgtttccgaaactttttgtaatgttatcggtgctgagcacctctttttcttgatattgattcatactctctatttcagtccgcctgccgggcccagggaacagtgctgaaactaatttttaggtattgctaaaaacgacccggaggtagagctgccactacctaaagggggagtgcgccctccccgtgacacaacttctgggtcaggagttggggtaatgatttaccgcgattgcctgggaaaacctatatagatagctatttgttagggggttagctaaaatcaaggtaggtaacgcgctaggtgctcgttatgttatccaagtggggagctaatttccgatgacattgtaatctctactcagctcagctgagacgccgcccttaatcgttgcgtcctggagattattatgcctgccatcattctcgaaaatatttctttttcatattcctctaaaccgctgctcgaaaacatcaatttgcaggtaggggagggtgagcgtgcctgtttgattggtcccaatggttgcgggaaaaccaccctgcttcgcatcgcttcccaggatcttttgccagaacaaggcaaggtcaagatcgagggaacaaacactgagttcttccaggtgccggcgattgaacattatcgtggaagtgccagagattacctcgaatgcgcgttgcgtcctctgcgaaatatcgatacccagtttcaggacgcgaccaccaaaatgagccagggtattgatactgaccaggagggacagcgctatgaccagatacttgccttaatgagctgttttgatatttggtcgctcgaggcgcggctcaaggaggttttggcgaggctgggattgaggggggtcacaggatcaggacgtgaccgcagtttaagcagtatgtccccgggggagcgggggaggctgcaactggtggtcacgctaatcatgaagcccgaggtgttgattttggatgaacccaccaaccatttagacgcgcgtgcaatcgattttctagtagaaaccgttaataagtggagaggcgcggttttgatgtcgagtcacgaccgggcgtttatcgaggacactgccacggttatttacgatatggacgtagcactatggaatgaactagctaaagctactggtagtagtcaggttattggtctttatcgctgcgcgggcgcctactcgaaatatttagccgaaaaaacgaatgcccgccgcaagcatcgggaattacatgcagctcagcaggccgagaaacggttactgagaaaacatcgccaggaagctagcaagatagctcgcgggggcgtacgcctggcgagcgctgaggggaaagccaagaagttttttgcggatcgcgctgctgccaccgcgcagcgccgaatgcgaaatgacgataaacgaggcgagcatcttagcaaccaggaagtgcgtagaccccgtagctacgacctgtcttttgagctcaatcaacccgctgtaagcaccggaatcgcggtggctgcccgtcgtgccacagttgccggccgcttggcgccggtcagttttgatctttcctgcggagagcatctgctggtcactggcgctaatgggtcaggtaaatctaccttattgaactggatctatagtgggcatccacccgagggtgcgcaaagtagcggcacaatcaccggcgaccggagggtcgggctggttcctcagcagcttcctaaggaaaacgatcccaggtttactagccccgtttgggaaaatggtattggcgaggccggcaaaggcgtcctccatccttccctgtggactaagcccatcccggagctgtcggccggaaaccagcggcgagcccaaattgcgttagcgctggccacctctcccgccttgctcataattgatgagcccactaactacctggacttggagacgatgcaagcgctggaagaagccttaaaggagtggacgggaaccctagttgtagcaagccatgaccggtggctaatcaaccattggaaaggtagaaaaatttatattcactagcgcttgctatagttttcatctttcatagatatcgcggcggtgtcccaaatcattttttccgtgccatagcgagccataattttctgacctttgccggcatgtgcaattcttggcggtgattccgtaagggaagcaagggaaagctcttgaatttgtactgacagatattttaaaatgtatgtgcaaatgttgaaaggaggggctgatgggagctagcactttaactgtcagaattgatagcgggttaaaagaagaaacagcgaaagtggtggagaactacggtcttgatttgtcgtcggtgatccgcgcatttttcactgaaatagtgaacactgagtccatcccgctatccttcgattaccggcgacctaatgccgagagtctggaagctattcgtgaaaccgagcagatgatcgcgcgcggtgaaggtaaaacctatgtaagtggtcgggatgttatcgaagcagcgttagcatgaatgggaggcttacagccaagttcacttctgcttttagtagggatctaaagaaaaaagctgctaaaagacagtggaatctcgatgaactggaggctgtcattgatctgattttagaaaactcgcgtgaatcgctcggtgtcctgaagcaacgccacagaatgcataagctctcgggccaatggggtgggagcaatgagtgccacgtggctaatgcgggtgattggttggtgatttggagaacctgcggccaggttgcctattttcaacgaaccggaactcacgatgaactttttcgtaggtaaagaagggatagcgggggcaacttaaaatgtgggggggcagccacaagtcatctaaaactgggcgatgattttaatggttccgccgcatgaaaagtttctttaacttgtactgacggttactaatgatttacgcgcgaaaatctttagaggcgggaagttgctagctttatctataaaccagttagattctgatgctttcaatctgtatttatgtggaggtcattttcgagagcaaactggtagatatctctggttagtgattgtgaatgccagcgggcaaactttccagaggtgttttgacgcatggcttgcaatgcaaaagttctagcaccttgtaatatttttgggtatttttggcagattctttttaagtcaccgctggtaaacaccacttggtcggcggacgtggacctgtagtctacttggtcaacaaaaaaccctcgggtataacgcttccaaggtgtcgatagggagagcagcctgctatgcgaaaacgttccggcagtagtattgagacaggaaagtcccgaggcctcccttctcgggaagaaaagaagttccagagtcccggtatttagtgttgcccaacgacctcctgcagtacttggataatctgaaatcgtccaataccttccttcaagcttgatagcttcgggaaccagatttgttaaagcaaaaaccaaatcagcgagaatgagatctcggtattcatcaggaacctgttttagaaacttcgaaggttcatttcccaaggaaggtaatttttctttcgtgccgcacaaatcgtaggggccatccccaagtacccaagaatgctgttcctccaccggtatcgctttatccagttttgagggttgattgtgacctaagttcagagcacgattccgcaaaggcttaccagattcccgaaatctgcgaatttctctatcttctatttccgtcaagttcaagtcttggggtacaggcataaaccataacttctctatgtcatcccaagcttcatggtgattggtgtgaccacgccggtgctgagcaaaacgcgttactacattctgtgcttgaccgacataaaactcgccgttgaaaaattggagcacatagataccccggcgttgttctggaattaacgcggaaatcgactccagctgggatacattaaagcgcaaatacttaaggtttgctttaccgggatttgtgctattagaagaggtcatcgcgtggttcggttcgggttagtgtcaacagcagctcgcttgctcgacacagtatatcaacagccaatctgccccgaggcgaatttcgtggagcccggtttcgagtgggtgttcgctcgctgcgctctctacggctcttcttcgcctgtttttccttgggtagtacggtcgaacgtcactggaagataatcgccgatgatgcttattggaatagactttatcagtgcaaattactggctttcatttgtcatagatatcgcggcggtgtcctaaatcgattgctaggattagcagctctgagtccatgatgtcgcagataacccggtagtttcccacgcgataacgccagtagccggatagttcgcctttcagggctctaccttttgagcgggggttatctagctggctaacaatatggagttcttttaggattcgcttcgcagaggtggcatcaatcttgctgagagccttttctgcgcgccgagtgaaatcaattctccataccatagcgagacatcatttcttctaggctgacggtgtcgagctgtcctgcgcggtaggctgccgaatctcgatgtaaagcgcgcgcgtaatcggatactggtgccgccacttcgaaggggatacgtcgttcagtcccaacttttttggcaaaaattgtaaaggcggcggtcagagtcaaccccatagctttacaagcatcttccatcgactctttcacatcagtatcgagtttaaaattaacatttgatgttgttggtttcattacgtatcctccttttttatagttattgtcagtgtacttcattattttatatttgtaatccattgttctgttggttgttaaaaacgaaggggctgacaaactgtaagccgtctaattccgggcggtgattctaaaagcaggacaagaaaaatcgagctgcggaattttccggtattctgactgacagatcttaagattttatgggatgggggcagtggtcatgcggtggtacgagaatcccgatctgtactgggttattggttgctgcttagtgggttgtagtggagttttcgcggtactactgttctgcggtgcagtcagcgttattactggggtagctaatattctttctactttggctcttgctattacctgttatgttttgtgctatcggtttaaacaatctacgtctgactcagataaaaactaactaaaccgtgccactagaagaggtcatcgtgggattcggttcgggtgactagcagcagctcactttgagcgggtagttgcacctgcggtgcctacccttcttcgctcggatcagaaatatgaaagcaagctttcatactcacgatcctcactcagagcgggtgttcggtcgctgcgctccctacgacccttcttcactccggttacaagcattcaaacgcgttccgcgcttgagcttgtacctccgttcagagcgggtgacgagaatcgaactcgcctctacagcttgggaagctgtcgttctaccgatgaactacacccgcgttggcatctagccgcctttagagtataaccagtaccgccgccccactcaaaacgagcgattaaagtgagaataaatgaccggcgacgatgtcctaagcggctaacttggactcatcaaccccagggaggaacaaatgactttcgtagtggcgctagcggctatctgcgatggcaaactactgtgcgcgcagcgttcctacccggaaaaactacgcggtaaatgggagctaccgggcggaaaagtgcgcgagggcgaggaaccggtagcagcgttagtgcgggaaataaaagaggaactcgattgggagattcctccctctcagttgaagcacatcttacccggaccgctcccggcggggaactggccactacttaaaggcgcccagatgcgagtaatgatttaccatccccgtgagctcccggctctgcaagctggggactctcatctcagcttgcagtggagtccggcagaaaaagtaacacagctagactggctagaacccgacttgcctatagccgaagctataagtcgcgtcctgaaaaaccagcctagctgcgtcctcaaaaatagatatccagcaaccggagcctaaaccccggttaacttagtgttagctatcttttagccccatggcctcaaacaacagatagattgggtggacagccggcttgccgccgccctttgccagttgccaacggcaagtctcggtatccgaaactaccaggtcagagttggtgctcttaatcttgtcgaaggcggtcttacctactgcctgcgcaatatcgtacttttcgcgtttcaacccgtaggtaccagcaatcccacagcaggtggctccggattcgtggacggtcagcccaggaatcttgtccagcagctgcttgcctggggtaccaatgcccgtggatttgagctggcaaggagcgtgataagtaaccgtgagattaatcggctccagattatccaggtccagttctccccggtcgtaaagatccagcaggaactcggaaatatcccaaatgcgccgcgaaacctgctcgagctcctcatcttgaactcccagaatctcgcgggcttcatgtttgaccatgcccacgcaagaaccggaagaaccgatgattgtcaggtcatccccgggaacgttcaaatcatgcgccagcttgcgaatcagcttctttgccccgtcataaagaccgttagactgctgcgctagaccgcagcagccatgaggcggtaccagcacttcgtatcccaggtgctcgagaatctgcaccgagcgtatagaagtggtggtttcgaagaactcacccgcgcaaccgtggaagaacaccactttgcctttagtgggggcaggagcagtgcgggtatgcttcttgaaccatttttcaaaactgaaaccatccgccaccggcatcggagcttcatggtgaaccccgaaagttttctccacgatctgtcgaatcggcttttgccgtagcgcccagttcgcgaccggcgccaccggagtcattgccttacccataaacatggtgttggagatgagcacatcgcgaagcggacggccgttttgttgcttcatcgcggcgcgggccacgttattgagctctgcaacctttaccccttgcgggcagaccaaagtgcaggtaccgcagctggaacagtaatcaatagtgtgatcaaccgatagccccttacggaaacgctccgcctgcggacccacatatttaggtccggggaacaggggagtaaccgctgccaccgggcattgggtttcacaaatcgtacatttgacgcaagcatccaagctggctcgcatcagcggattaaactcgggtttattacgtaaatccttagtcattggtatctcccaaaatcgtgtcacaagcccgcaaagcggaagctacagcaatcccgtcaccggacttttcccgccaccgggtggctcccgcaagcaatccgccagtggcatacaggttctgatatagcggagccccggacgtgtccagtacccgcatctgggaatcgacccttactcccacttcgaacagtggttggtttggtccccaatagtcttcgtgaactagcggtccttccgggattactagcggtaaatcaaaggcgcgttctttcaccttccaataagagtccacattcaaagttcccgattcaaagccgccaccagcgtagatgaagtgtttagccgtgatgatggtgtcagaccccgcagagttgatagtaaccgattccacgcggccatctcgggcactaagcccggtcacttccgagccgataatatagcgtgcccccaggtcacgtaccatttgggttagggtctcattgatccgcatccctggaatagagggcggtagcaggggaatctcaaacacctcatggctcaggcgacgggcaatatctttccaagcatcccggtcttttagccccagcaccgccgggaaaccaaccacttcgccctcttctaagtagggcttgataaggtcacagaaccttgcccggaaatcttccctatcgagggcgcgtgcgaaatttaacccggaagtgtctgcttcgcccggacgcaccggaatatctacccaaatatgacgcgcactaacaccgccgccaccaggcagttcccctttctgcatattttccgccaccatctgcggataaaagtcctttaactggcgcagccccacgatcacatattttttgccgtccgcggctgctcccgccaacatggaaggctgcggcaaacaggtaggacgccaagcgcccaggcaggtaggcaaaaaaacattcttatcggggttgcccaccagcaaatccgctcctagcagctcctttaaccagtttgctgaatcggcaactgcctttgcccccaactttccataggggtgggattcgggtaactgatcgattgcctctaggggattatctacccgctctgggctgtatccgtataggtcaatagtgccttgcccgagctggatacccccgatgcctttggtgattaaatcaacttcccgcccggcctgaagcagccgaactgcagcactgagtccggaaaggccagcaccgattactactacgtctctcacgctagtgcctcctttacggcttcgcgttcccgtttatcgcgttcttgttccaccgggttgagtgcgacctcgctcagttgtcctttgccaggtgcatgctccaggtcgaaaattccctgcataatccagttatcgagcgcgacttcccgggcggactccccgaacaggatgggtttgatcccaatccaacgattcttcataaatagggaaatcatgttggttgcccgctcaacggaggcagcgccttggtcattgacaatcccggcacaacgcatggagcagaacccgccctgacatggccccatcccgattcggagttgccggcgcagatcatcgagggaagcattggggaattcctggattttttcttccagcatccgtcgagaaaccagttcgcattcacaaattatttggtctttattccactgtttttctcgcgcttgcaagcggtcggtgaggcgatgctcgcgggaatcttcctgaccgggtactgcttcctgagcggtgcgacaggggcgtacgtcctccatcagttcgcacatgatgttcacagcgcgttcggccatgagccggcaggtagttagttttccgcccgccaccgtgagcattccttttactccgtcgcgctcctggtgatccattatcgacattcctcgggacatatggcgcgaatcggtagcggcgacccggttgtctttaaccaaaggacgcgctcccatccatacgtgcagaggacgagaatgacggaatccgggcagtagagcttcccccgcgtctagcatttgctggacttcttcgtcttttatctccaaaaagtcggcgctgggtgccacctggtcggtagtaccgataatggcgacctgatgggcaggcacaatcaaatctccatccgaagggtaaacgcagcgattgattacgtgctggcagatgcggtgattcatggcaatcatgatcccggcgccgggaactacatctacatcatggcaacctgccagggcggcgatttcacctgcccaaggccctgcgcaattaattacgaactggcagtcgatgcggactttttccccaccattcttgtgatcttcacaaatgacagcactaacagctccgtcggtaacctcaatgtcggtcacccagtgataggggaggatttccgcgccgtactctttagctgactcagcaaacccccacaccattttccagccatcgatagtgccatcttgtactgcgaaagctcgctttagtttagggtccaggcgcggttcgcgtcgcagagcttcggcaacagaaatctcgtaggcaggcactttggtcttttgtgcacattccaaaaaaatatcggcgtgttcttcactgtcttgggaagtagttacaaataggccgccggtgtcctctatcgcgtggggaacaactttccgtaaaatagcgttttcttccgcacattcggtggcggattcgggatccgattttacgtagcgtcctccggaatggagtagaccgtggaatcttgcagtggtaccttgggctagatcgacccgatctaccagagcggttttaaatccccgcatagccacatcgcgcaccacggcactgccggtggatccgccaccaatcaccaccacatcgacttcaagttttttcaccctatgcctccagaatctaacgcggcctcgctgccgcgcgttcagtagttgccacaagatctcgcccctgcggctctttttcagcgtatatcgcacatccatttctcgtcgggcttagtgcgcactttgcacatattcacacgcgattttttgttactacacgtcctctcaaaagctaaaaggtctttcgctgcaattagttcccccgacaggtttgcacagatttgcaaaaccgtcgggggagagattaatttctgaacgaatcactagctaggggaggggacaacaaaaagtttagccgtctctcagtctgtgtttggtgaaagttcaagttaactgctttaagttcactacacggttttatttttccgattaacaaacttccggaagcgacaaagatgcactctcggatacggcctgccccgtagcaggatcgaagaagtaaagttcttctaagttgggcttcgtccgatagatctcgccacgatcagggaacacccctcgctgcaataacaccgcagctcgatccggggtggcagctactttttctgggggttgcccatataggaatgcctgactacctaagcgttcgatgatgtgggtagtaagggaaagtgccgcctcctccttactggcgggtaaccaggattctgggcgcacccctaatatgacttcctcttttaattgggcacgcaccgtcctgggaattggtacaggcaaatcacctagcagagcttgaccttcagagttaataggcaaagtgaacaaggtgatcgccggggaacctatgaaggaagctacgaaagtgtttaccggattgcggtaaaggtcagtaggggtagccacctgttgaagtacccctgactccatcaccgctactcgatgacccatagtcattgcttccacttgatcatgggtcacgtaaacagtagtgacttctagttcgcgctgcaaagatgcaatctctccccgcatggaaacccgcagtttcgcgtccaggttagatagcggctcatccatgcaaaaaacggtgggtttgcgcacgattgcgcgccccatagcgaccctttgccgttgtccgccactcagggcactgggtttgcgatccaaaagatcctctagctgcagtagctgggctgcccactgcacctgttccttaattttatctttcggcatcctattgttttccaaggcgaatcccatgttttgggcaaccgtcatattgggatagagggcgtagctttggaacaccatcgccacgtcacgtgaacgcggccgggctccggtcatatcttcaccgccgatcaagattcgtccggaggtgaccggctccaggccggccaccatccgcagcgaagtggatttgccacagccagacggtccgactaaaactacgcattcaccgtcctcaatatgcagattcagggaatcaactgccggtttggctgctcccgagaacaggcgggatgcattttcaaaagtcacgctagccaaggcatttcctttcttgttggcgccaatacgccctaatagttacttattcttatcgagtttcggtttaatctgattgtcgataaccttttgcaaatccttctgcagggcatcgaatgtggccttcacgtcctcaccttgtgcaatcttgtccaaagcggcaccaatcttttgaccgccaccagagacataggcgcgggcggcatcctgtgctttggtcataggcaactgatctagagcggtctggaagttggggtgctctgttacgtatgctttggtttcagcggaatcaaccgccgaggtgcgaaccggcatatagccggtagcctgcgagaacttcacggtgttctcggtgttggtgaggaaagcgatgaacttggcggctgcctcttgatttttggatttagcgggaatcgctaagccgctccctccggtagaaactcccggcacgccctcgggagagggcaggaatgcggtccccacattgaccttgccgtccttttcaacgccctgcagcgagccggtggattcaagcatcgcggctgctcgcccggtagtgaacggaacagtggcatctttagtggctttaaagtaaccgtttttgaactgatcttgcaggaactttccagcagccacgcccttctcatctgccacgttcacggtcagatctttcgaataggaaccgcccatcgaccaaatcatgccctggaagtaccaatccaggtagttggcgccgtcaggaatagacaggggcagtaccccggaggccttcagtttaggtgcgtaatcattgttccactcgtcccaagtcttaggaccgcggtcgggaacacctgctttcttgaacaagtctttgttgtagtagaaaagcggagttgaacgcgcatagggaactgcatagtgcttaccatcgatggtgtactcatcgtaaagcgactttacatagtcgtcgggttttgcatccacctttttcatcaggtcatctaggggaacaaagttatcgtttagtgcgaagttgtaccagttcacatcggacgcaacgattacatcaggagtttgcccaccggtgagagcggcattgaacttttgcgccacttcctcgtaatctttcccagcgtcggtgagcttaatcttgatattggggttttctttctcgaaagccgcaataatttcctgttcggtagctttcgagctagccgggtggtttgaccacacgtccaacgtcaccttgccgttagggtcattttgctcgacagatcccgaggaggaagtgccggcgcatccagacagtaccagggatgcaactgcggctccagtgaggagcaatttccgtgtacgattcatttttacctttctgattgtccaggtcagcccttaactgccccggaagtaagtcccttaatcatgttcttctgcagtaccaggaacacgattaagagggggatgacggctagcacggtgccagccatgaccgggccccagttggtgagaccctcgttattctgtaagaaagtcaatccgatttggataggggcggtgcgttcgtcctcagacataaggaatggccacagatattcattccagtcattaacaatggtgatcagggcgaacgcggacagggttggccacgacatgggcaaaactactctccaaagcagtttcaggggaccggctccatccatccgagccgcttcgataacttcggtgggtagcgacatgaaatggttacgcattaggaaagtgccgaaagcggtacctgccaggggcagaataatcccggcaaaggtattgcgcatattcattcccgctaccagcgaatagttagaaatcaccgtaatctgattaggtaccagcaaggacgcgataatcaagatgaaaaccaggttgcggccggggaagcgcagcagcgctaaggcataagcggagagcacacccagcaggattttcaccgctgaaagcatgatggtgatgatcaacgagttccgcaggtaggcgcccaggggtatctcactgcttactgcccggtagttctcggtggtaaagggattcgcgatataggtcgctgggtgagtgtaaatatctccttgggtcttaaaggaagtaagcacaatccaataaatcgggatcatgattcccaggaaggcaatcaccatggcgatatacccgattaccttgaacacggtagagggatgtgccgtagcttcgcgaacgtcctcgtccctattgagttttagaaatgaaagtttgttgctcattatttatccctatccattacccgcacttgcagcagggttattaccagcagaatcaagaacataatggtggctacggtggctccatagcctgcccgggcgttaacgaatgtttcctggtaaatctggtaaaccatggtggtagtgccagtaccctgcgggccgccgtgggtcatcacattgatgatgtcgaatacttgcattgagttgagaagtacggtgattgacaagaagaacgtagtaggacgtagttgcggtaacagcactttagtgaaacgtcgccatggggaggctccatctatctctgccgcctcgtccaggtctattcgcctagcttggagggcggctaggtagattacgaaggtgtagcccaggttcttccagatataggtcatagtcaccatgaacagcgcccagttggggttttggtagaactcggggatggaagtgaatcctaggcgaaccatgatgtcttggatgagaccgacgctggggtcgaacacgaactggaacgccaccccgatggcggcgccggaaataacgtagggcgcgaaaaccactgagcgcactacattccgcccaaagagcttttgatccaggatgatcgccataataagtcccaggagtagcgatccgaccacggtggcgaaagtgaagattaacgtgtttaacaggattcgtccggtggaatctgcgtggaaccattccacatagtttccgagaccgatgaaggtggcctgcggggaggagatgttccaatccatgaaggataggcgaatgttgtcaaggagaggacgataggtgaaaacaaacagcagtatcaggttggggataagtaacgctgctgctaaccatccttccgcccggtctggtctgtcggagcgtttagcgctgtgagtcgcgctactgctggggttattgatcctgggttttgaggaggtcgggggcgtggcgccggcgaccgcagaagaaagtttcttagccacaacccaagtactaagagattctccttaactgaaggggaataggagtttaccgcttggcagctaatcggtgaacacttcctggctaataggttaatttttgataactcccgccgttatttactcactttcaaagacagttccccagtcgccaaagttttaactctgccgcctgagatgacagacccgcttcaaaggtgaacaaaagtcctaaaagtgccctgctcacactataattgccaggtgccaaaacctccgtcctcgccgctagtgcagttaaccctgccgctctatgcgccctcactgacctggggaatcggactgggaaccttaaatgcggttacggtaatcaccgccctagaactgggaatgcacgcggctttagcctcggcactggtaggaatcgcgggcgttactgcagtgatcaccggcccgcttatcgggcgtttcgtagaccggttaggagatcgcaacgccctaattaccggctcattactggcaacctccgctttggttgccaccctgatttctttgcgatttcctggacagagttttgcgcaaatgatttatctaggcgcaatagtggctctggcactttccagcggaatctggcagctagggcggcaatcttacgtaaccgaaacggttccgattacttttagagcccgggcaatggccatgttaggagggatcgcgcggctagggcgactggtaggtccggccatcggttcggcagtgattgccgcctggggaattgaaggagcgttctacttacagatagtaacggcgctgctagcagcagtattagtggccgtatttaccgctcctgatccgcatatgttggaagccgggctggcgggggcaataaccggcgatcgggaatcaacaggaaagcaaaccacccccgccaccactcccattaagccaggggcacgatcctccgccgacgcaccagccaccgccctgctggcggtgtgcgcgatattgctgtcactggtgcgagcaggacaaatagtggtagtaccactggtggggcgaaccctaagtgtgtctaatgaagttatttccgcaaccttcgcggttagcgccctgctggatgtggcggtcttctatgcctccgggcagctaatggatcggttcggacgccgcgccgccatcatcccttccctagcgattatgggcgcaggattcattgccttagggcttgcaggtagcctgcttccctatttcatctctgcctgcaccgtggggctcggcaacggtttggctgccggaattctgttcactatgggagcagacctatctcccgaggtaggacgctcgcgattcttaggcatctggcaatccatttcccaaatcggccccaccgttggccccttccttacctccgccatagtgggactggctagcgcggcggtagcagccgagattaccggggcattggcatttagcggatgtgtgtggtcatttttcgcaatcccgcgcgcctaccgccggattgggatggatgagcgggcgcgtcctctttaaatagcggttttagtaacctgcgtaaggaaaatagctacccgcccctaacaagtatgcgggctgcgctagactgaaaccatgcttttatctgaccgtgacattgccaaactgtgtgcctccggggaagtcgagattgacccctatgaccccaaaatgattcagcccgcctctatcgacgtgcgcctggatcgttactttcgacttttcgataaccataaatactcggtaatcgacccggcgctaccccaagacgacctgactcatctaattgatgtgggggagagcgcaccattcgtcctccaccccggagagttcgtgctgggatccaccttggaaagagtgcgcctagctgacaacattgctgcacgcctggaaggaaaatcgtcactgggacgcctggggttattaacccactccactgccggtttcatcgaccccggtttcaacggtcacgtcaccttggaactatcgaacactgcgactatgccgattctgctctacccgggtatgaaagtcggtcaactgtgtttcttccagttgtcttcggcggcggaaaaaccctacggatcccaggagcgaggatcgcgctaccaggggcaacggggaccgactgcctcccgctcctacctgcgctttagttgcagcgaagtaccgaaaatggaagaaacacagtgagcgatactccgcttaccgatacctctacctttgcgcggatagaaaccgggaaaattcgtgcggtacgcctaactgagcagggaatacaaactcaaaagcaggcggcagctattaaccccggagcgtcctatatgcgctgccagggacccctggaagctgctgacttcaccccggtaggttgtccgcagctggtagttttccccgcggaagtcaccccggaagaggtagaggcgctagcggtttccctttgggaggacgccggatgggttgctcctggccgcttgcgcctgacgggacaggccgaattgaatggtcctttttctcttgaccagcaaactcgtgaaaccttgcacttgccaccctactcccaggttgcttttcgcctggattgtccgcggcagcgtagcggagagctagcggaagatttgcgaggaatcgacctgctcaccgatgcttttgctgccagtgagccgattggtctggaatatgaagcgctccgtggcctactagcgatttgtcgccgcctaggagggagtctgcgggtggggccgggaaatagttcaaaagactccgctgcacaaatgctttcaccggatccggactcggcggtaaacttggcggtttattcgccctattggatagaaaaaaatgccctaaaggatctgctagaaccggtcttgggagaactaaatacagaaccgggagctcccgagcgccccagtcgttctcagcagcgtcttaagcgggaggccgaagccttggtaaccgcccaactgggagcagaaaaacttgcctggatagcggcagaggcagcagcttttgataaagaagtaggtgggcagctaagtaacagcaatgcgtttgctttttacggctccctggggtcgggggcagatttctttgtgggagtcgaagcgagtttacaggtgccggcctccttgcgttttcaccctaatcatggaaaacctttcgctatctaccagttgcaatggttaggggaaccgtcggggaataggcgtcttagccgcgtagagcgagtggcgcggatgaaagtaataaacgcctttgaggacgcggctcgccttttggctcaggtagctgcgggaacggtagtagacgaagattccttcctagtaacctggaattagtttcccttctcttcagtagttgcggtaggggatgacctcagccgcctaaatcgccaatagcgaatgcaaatttctatataagtcgttgtagaaactagaaaacttttcctggcggcggctagaatttagcggtaatcgcgaggtgcaaggatttaaatgaactcaaataacaagctcgcttctcctagagggcactcagaggttatgcaagtgctatcaggactactgatggtgctgttcgtggcggtaatgtcaataactatcatcggtaccgcactccccacgatgatggcggcacttagcggcagcgaatctcaatacacctgggtggttaccgcagcgatgctttcggcgacggtagctaccccggtttcggggaaactcgccgatatgtatgactccaagaaactactaatcggggccatcgggctgtttacttttggatctttgctttctggagcagtaaacgctgcctggcagctgattattacccggattgtgcagggcatcgggatgggcgcgatcatgtctctttcccaggtggtaatcgccttggtgatccccccgcgcgaacgcggacgctacaacggctatatcggggcagtaatggcgattgccaacatttccggaccattggttggtggtttcatagtagcgactccctggatgggatggcgttggtgcctgtggatttctatccccttctccctggcagccatggcggtgctctggcgtttcttgaaggttccgacacctcaaatcactaaaccgaggatcgattttttaggtactgccctgattactgcctcggtttccggtaccttaatttggctgtcactggccggtaaaacttttgcttttgcctcctggcaaactgcggtgatgctcactttatccgcgctgttcctggtggtattcgtgctgtgggaactgcgttttccggaacccatcatccccatgtggatgtttactcagcgcaccaccttgctggcgattttagggtcaatctcggtgggaactgcaatggtggctccgcccctgttctttacccagttttttcaaatctcgaaagggatgaatcccgcactggcgggaatggcgctgctgccgggaatgatcggtacttttattgcgtcaactttgataggtcagctggtttcgcggataggacgctggaaacgcttcgtggtcggtggcttcgtggtgatgtgcctaggtattttactaatcaccctggttgaccaaaagactccctactggttctgcgccctggggatgttcctgctgggagcggggcaaggtgccagtatgcaaaacctggtgttggcggtgcaaaacggggtgaaactacgctacatgggagctgccacctctacggttactttctgccggtctatgggaggagctatcgggattcaagtctgtggtttcgtattcacctgggagattgctcgtcaggttagggaggggatggcgaaattagggcaaaaaggtgccaccatggccgaatcctctacgctggagctggataaattaaaccctgctcaacagcaggtgatccgcgctgcctatgccggcgccttgggggatatttttgtgccccttctggtactgtcgctaatcggattggtttgcgtatccctaatgaaaggtagtgaactgatttctgaatatgcagagcatgaacccgacagacaccaggcgaccgaacatgaacgcgaattggtgcgccgcgccctcgaaaaagatcagataagtaaagatctatctgccctggcccaaaaaaggaggcaaggggtagaaaccggagcggatattcctgccgaagattcccagtctgccagtgaggacgtgcccgattcagcggcctgtgctcgtcgagatatgccgcagaacccagatgaagatgagccagatttgggatcagcgaaccataacctagggtagtttagagataactaacaaggcggaaaggtaaaccatggatattgggtggaaagtagcaagtgccgccagcttggcgggtgccggactggtagcaaacctggtgattaacaccggttggaagctggtgactggccataaacctcctcaggatggggaagaagcagcacaatcttcgctactggaagtagtgttgtttgccgctatctcggggatagcagttaccctgattcagcgagcagccatgcggcgtactaatagctggtatggaggacgccaaaaggacgttcttgatcttggtaactaaattttcctaggatgcgggtttaaccagtaaaaacatgcctttttagaggctaaagaataactggtgataagctttaggtgacagtaacgacaggggagccgaataggctgagagtgtccaggtggacagaccctcgcacctgaaccaggtaatgctggcgcaggaagtcgagtctcttacttgcgcccgcaagtcccctcctgacagatggagggaaaaatgcgtaaattcgcgcgatttaccgcaaccttagcaatcggagccttagctctgggactaagtggttgtggaaacgataaaagtgccgcccctaccaagggtgatagcagcacggtgacgattgttaccaatggtagctggacgctgggcaaagaatctttggccaaagctaaagccgctaccggacaggaaattaagctggtaaacggggaagaatcaggcaccctcgattccaaattgatcctgcgtaaagattctccgctgggggatatggcggtaggattgaccgccaataacgtagtgaaggtagctaaggccggggtgattgcaccttcgaaagtaaaggttcctagctctgcggaaaaatatttgaataaggaggctgagggggcgctgcctctagatcgctccgacgtatgcgccaactacgatattgcctattttaaagatcataatctgacagtgcccgaaacctttgatgacctactgaaaccggaatacaagggcttgacggtaatcgagaatcccgccaaatctgataccggattggggatgctactggctaccgtgcaacaaaagggtaaagacggatacgtcaagtactggaaagacttgatggctaatggaaccaaagccgtaaatacctgggatgaagcctataatcaagagtttacccaaggcgaaggaaaaggaaagttcccgatcgtgatgtcttactcctcctccccctattggtcggtttctgaggacggcagttcggctccgactgccaatatcgcgggtacctgctatccggcggtcgaatatggggcggtgctcaagggcgcgaagaacgccgctggcgccgaaaaggttttgaactggctttacagtgaggaaggtcagagcgccattatgagtgaaaacatcacctaccccattgatgagcaagtaaaactagatccgaagctagagaagttcgctccccgtcctgaaaacgataagcaacttgatccggtacagattgagcagaaccgtggcgagtggattcgccaggtacaggcggtactgggataacggcttgaccagcctctctcagcgtcgaatcctaccgccgggacggatatttctcgtcctggcggtaggaattcctgcccttttcctgggggtctgctttttttatccggtgctggcactcgcctggctgggagtagggcaggccggagaaaccggctatttttctaccttttggcgagttttatctgattccttcacttggcgggcgatccgtgacactctcatcttggcgctggggggaactttcttctctaccctggtggggttgcccctcgcctgggtgctctactgcctaaattttcgctttagaaccgccctacgcgcggcaataaccattccctttgtcctgccgaccatcggggtggccgctgcttttaaggcgcttctttccgaggatggttggctgtcagctttggggctggacggcacctttggagccgtcattttagcgatggtcttctacaatgtttctctaatagtgcgcaccgtggggccagtctgggcgcgcctcgatcaccgtgcctaccaggcggcacgcaccctgggagccgcgcctagccgagcgtttttcaccgtcaccttgccgcagctgctaggggcaattgcttcggcagcttccctagtgtttctttactgttcttcgtcctattcattggtgatgattctgggaggaatcggggtcgtaactttagagagtcagatttatcaaaccacctccgttgatttagatttagcggcggcggcagtcctagcgctcctgcaggtagtgatagttgcggcggcgctggctggatctcaacattttcaaaataaggcgcgcgttggggtaaagctgaagactattgagagctcccggctggctcacggcagacaacgcttcgcggtctgggcggccgccgcagtgattataattctgatagccctgcccatggcgcaggtagtggcgcgctcatttcgccgacgcggacaatggaccctgcaaaactatctcgacctcacccgcccggatgcctctattttgatagatcaaccggtaatcaactctttaggggtgtcgctgcgggcagctcttatcggtgcggtggtttccactttattaggagccttggtagcagcggtaacttcccggaattttcgtaatccgcggatgcggcgtgccgcagaaatttttgattccataaatatgttgccgctaggggtttccagcgtggtgattggtctgggattcttaatcactttagcggctcccccttggaatctggctgacagccccttcctgctgcctttagcccaagcattgggagcatcgccgctggtaatcaggttaatgcgtccgatgctgcaaactatcaacccgaagcaaagagaagccgctgccaccttgggggcacgtccttcacgtattttcttaactatcgacggcccctatatttggggagctgtggtagtggctttcggctttgctttcgcggtttgtttcggtgagtttggggccgcatccttcttggtgatgccagaatccttaactttgccggtgatgatttataaactttctggcagcgcgggacctgccgaaaatggaatggcgatggcagcggccgtgattctctgcttaacctgttccctggtgatgagcgcagtagaagctctgcgaaaaagaaaagttggtgaatactgatggacggcttagctatttcccaggcacgcgtgcaatatggacaggtcgaggcggttaaagatctcactatcgaggttccgctgggtacggtaactgcgctactgggaccttccgggtgcggaaagtcctcgctactgcgcgcgattgcgggactggaacctttagcggcaggcactatttcttggcgaggacgcaatatggagcaggtgccggtgcatcagcgtcgattcggaatgatgttccaagatggacagctttttcccagccgaaatgtaagtggcaatatcgcctatggaattgcgcatcttcccaagacgcaaagacggaaaaaagttaaagaactgctggataacgtaggtttgagtggctatgaagatcgtagtatcgataccctttcaggtgggcaagcccagcgggtcgccttagctcgttgcctcgcgccgcaaccggaactgttgcttttagatgagccgctctctgcccttgatagggcgctacgggaagaactggtgattaccctgcgccagattattcgagatttagaattaacggttgtctatgtaacccacgaccaagatgaagcgttttcactggcagaccagattgtaattatggatcagggagaaatattggccgcgaacagcgcggaagaaatctgggaagctcccggatctcaagccgcagcctctttccttggatatcgtccttttctcagtgccggagcagctgcaaagtttgggattgaaattggagagggtgaacagctggcaatagcgccaggaggattaaagatgtgtccggctggacaggggattgcggctaccgcccgcgatttacgggtgcggcgtggaaaatatttggcggaggtttcttggcagcaggatagtgaagaatacgccggacaggcagagtcaggattgggtttgcacctatcgaaaaagcaaacccagcaagaagtaggtttgcagattcagcgttccgaaacctgtgtggtgccagttcttggctgaccacctcgctgattaggttctttttcagcgttttctgctttaccggtgcatagggcagagatttttggatcagcgatggcgctggttacggtaatagcactggtggctgcggggtcatccaggcatttatccatataatctttcgccggtttcccacgctcgacctccccggtatcaataacccggataaccttttcggcacctttcagcttgcaggacacccggtcgaattgaacctgataggagctgccggaaccgctgacatcgcgcacccgaatacaggaatcaaccgggaaattaagaccaggtttcgctttgttcatggggttagccgcacccttggcgacaccttgattctcatcgttttgttgcccccacgtcttaaatgattgcggtgaaaaagtatgtagctgcttatcatcccggatgggcgggaatttaatgccagcggaatcggtaagagaccacaaggtgattccatcggcgctcgatactgctttcagctcgccctggtcagtggtgtagagcaagatgtcttgatgcaaacgtaaagtatccgggttttcgctgaattcccagagccgtttcccatcctgtctggaatagcaccccaactgtccgccgctagctatatataaaaactttttggtcggtaaaatctgggtttcacttcccagcttgaagtcggattcggtaaaaacagcccgcaaagatcgggatgtttcccaatccatctggaacagctttcctcctttttgcaccatatttaaaagatgtccggtgttatcggtagggaccgtggtgcctttggggaggggagcgatatgagcacgttgtggctgaatatagaacgagcgtacgcatccgtcatcagtgcttagcgcccacgcagtgtcgtcggaattgcggataagacgcccgggactggcaacttggatctgattagtttccggattaatcaggtaattaatcccgttatgcccgatcatccatagggaatcggaaaaaagttcaaaattttccggagcctgttcagtaggttgatcatcgagggaacaagcagttaaatcaggctgcaactgggtatcggaggccttctgggacattaatccttccgataggtgttcaccggtctgcgatattcgcagtaaggaaagatcttcgcctaccagtacaatctgggagtcggtggtgccgatgttgacgtagggatctactgattcccatacccaattggcagtccccattttcagatccacgagtgcgaccccggagccgttgccagattgataaaggcagggtaaaaagcgattttcttcctcggaatccccgatggcttgctgggcgcaggtcaccagaggagctcctaaatcaactgaccaggcggaagtgccgtcctcagctagttgcataataactgcgctgccagagccggtgacacctgcggcaacgcggtaatctccatagcttaccggttctactaaattctgctggccaagcaggggtatgaacgagtttacgtggtaggcgctggcttggaaatccgcctgtaaaaccggtttatttttgaagtaaccagtagcttgtgcttggcgggagctgtaacgtagccataaaaaagttcccccggcaattatcgccactaaagccagggtgaggattagaatgaccagccggaagagtcggcgttttattcgcgtcgcgcgagccacctgcttcctccttcctgtaactggcaacctagtcaagtttaacccgagaacttgtttaccgctgagggcgcgaccgagtagtaccgatccccagctcggggcagtagctaggggtgcatactcaaaatagttcagagttcacttatttatggttagaataaagccataagtttgaaccttaaggaataggtaaaactgaggcaaaccatgcatagagatccaggtaaacaggctaatccgcgggttgcggtaattattcccgccaaggacgaggccgaacgaatcggcacgacggttcgggcagttaaagccctcccctttgttgatctggaactaatcgtagtagtagatgacggttcctctgatgacacccaagatattgcccgtcaagcaggagccgtaaccgtgcgccatacggttaaccgcggcaaggcttcctcgatggaaaccggagcaaaagtggtggccatgcgggcagtcaaaggggaagacccgccactactactatttttagacgcagatctaggcgaaactgccgccgaggctgctccactgatagagccggtaatcaagggagaagccgattttacaatcgcggtattgccacgaccggcaggagcaggcgggcacggatttgtgctaggactttccaggtgggcaattaggcgcactaccggctggaatccccaggctccgctgtcggggcaacgttgcctaactactgctgcttttcaagctgctatacctttggctgctggctggggggtggaaaccgatatgactatcagcctgctaagtaagggatttgcagttaaggaagtgccagttaatttcaagcatcgtgtcagcaggcgggattttgcatcgcaaatgcaccgtctgcaccagtttattgatgttgtgaaagcgatttctaaactgcgggcacgcagagtgcatattaagaagcataggttctttaaagtggctttaaagcaaaaaccgggggaagtttaccgagttccactgggtaaaggttctgaaagctgagtaaatactgccgagcaataggccagagcggtcagcaaaaacccgattgcgggtagctgggtgccggaatcgtttagtagataggcgaaaagctgattcactgcaatggccgcgagccctaaccgtagacctgtttccctagctactaggggtagttcgcctaagcggggacgcaaatagctacccgagttggtaatggcaattaccagtttgcgtgctcgtggtttgacttgctgtcgccaagaccgtggggattcatctgcggtttcgggggaggcagaatcatttaggggtaacgataagtcccaagaccccactaggttataggggtggttttctttgtcgagagcagggcgaagaaccagcgcgaaaaccagtaggcagcataggagtgaccagacataggtggtgaaaccccagctgccgaggttcgctaatagtttccgggtgagaatctctagcaaatctccgttcaaaatagattgcacgaagttacctaagtgggtgcgttgagccgcaggtcgtaaccagtcggcgagggcgattcctccggaagcagtccccgctattaccagggcgaccagcagccgttttacattaactcgtttcccattaatcagcagtaacagaaccaggaaaccaggtaggaaagagatcggaccgccaaaatcagcgccaaaacgaggcatcccatccacgaccataaacgccaaagcaagtaccacaatcaatagatttgatagccaaatttgccagcgggcaaacccgtgcttaccgaaaactgctcggttagctaggggggttaggcaggcgcaaagcagtagcgtccaaattgcgcataccgagtaatacacatttccgaagccaaagaaacgcgctcccaaaagcgagaacgatccgaagggcgaatccatggaaatatgggatccccaagccacatccaggcagattacaaaaacgctgaaaacccccacaactagcgccgggccgatggggcgccctcgccaaggaccggtgcaggcagccaaggagagcaccccggcaatcaacaagctgagcagggtgaacgttggggtgggggattctgcctcccaccaaggaaacatggctgctaccaggcaagttgcaggaagcgctgctatcgtcaggcagataaaacgccctaaatagcccagctgggaaagtagataagaccgacgttgggaaaaacggattcgcggtatttttagcagcaccagccctaggagcaatagcgcatccgcagcgaaaattacataggaactggggggaaagcccaagcgagaatagctggcatcagctctttgcccgtaaccggccaggcgttcgatccgttctttggcggaagtgccagcttgttcgctgaccgttaacggtgcccccgaggtgctgagtttactattggaagcgtttagccagttcagtacggttgcgctcagatcagcgctttgggctatccccacttggtgtgtagaggaagaataggcgattcctgcctgcacgccctccccataaatcacgcctgcctgcagtttttgtttaaccgaatcggggctagtggaaaccaccagggcgcgagtatctttaggcagagccgctagggtgtcttgtagcgcttttaactgcgcatcttgctggtcaacagaaattcgcgccggctgcatccctcgcagtgcctcgtaggtggaaatattggggaatagccgggcgttagcgtgccgggtttttgctacatattcttggtcattacccggatccggcactagtagtgcagatagggaagatatatgcaggttgcctggctggaaataattatcggaatccccaaaaataccgggagaggaagccggcgtgggattttcttggggattcatttctgattgtcgcagctcattgcgatcttgagtggggaccgaggctaccttctgatccggaactatggccccagcttgcagagagtttccagagagggaaccgccgtgttctaaaagccagatcggatcccaaacttcgctttgctcgggagtatctgttccggaggagggatcaaggaaagaaaatatttccccttgctgcgtcagcacttcttgagtttggcggttaggattgcgattcaagggggtagcctgcacgtcgattagggtgagggcgtgcgtagaaaccatcttgcgcaccgcctgagaatatcccttttgtcctgggcgaatagcttttacttgcccccgaactatgccgtccttgtcggctagagccagcccggcactattcccaatagctgccgcgctcacctggctttcccgtagttgctcagagagcattcccagtcgagccgatagggaactcttcttagcggcacgctggtagtagctccaaagtttgacccggcggttattgtttaaagtttcggggatgatacacaagttcctgcctgcgagagaagatttgctgggacttttaccagctgaaaacgctaaccaggcatcctgggggcaagccatagctttaataggaaaaggtgcgagagaaaacagggcgccagagttaagggcggcggtactttcactgttttgcggggaggctgtcaacagatccgtccagttcaagccggaggtaaaaattacggcaaccggagtattcccgggattgggtaggggttttattttacgaggttccgcatctgggctgactccaatcacccctacgctggctgcgcagaacatagcaattactaccgttagcgaagcgagagaaactaggcgtaaccgcgatttgctgactacctgaggacggggagaagctgcggggagagtcagggataccagggcgattgttagcgggattaggaatagtagtgcagctagcagcgcctcgaagttgctaaaccagtaaatcagtccagataagacagcggcataaagtgccagggatgctacctggcggcgttgattttgcaagaaaatgcggcgaagtggcgttagctgcactaagaagcaggctatcgtgactcctaagcagctaagtaatagtccgaatgcctccgcggataacttcatcagccaggggccgtgcaatattgaataaccgaaaggggttcctatcagggtgtattcgggattttgacctacccaccacagcactccccaggtaagagtggaggcgcccagtccggctatttgagccacagcgcggctatttaagctgaaggtttcccgcattgcctggataaacagggataacagggcagttaagaccagggaggttagagaaattaccgcaatcgcgggcagaaaagaggacgctagtgtcagccctgacaagtacagcaggcaataggaagccggagctaccaaagcggtgaagaaaccagcgaagctgagtgctctattaacttttaaatggggtttccggctccctatttgggtggcaaaaaatcccaatacggttaatagcaggccaaggctccagagaaggtaaaacccgctgttagcgtctttagcggaagttgagcggtaatactgctggtctaggtagtccaggcgttcttgtaagtttgtctgcgctggacgggataaggctcctgtcaggtttgtcagagcttggtctttaccggggatattgctagctttaaaagttttgccggaattctcagcgcgggatggcagctgcaattggtaaagaatctgggcattaatatctgccaaagtgaccagaccagggatattggtggtgggggaagaaaccaatccggtggcatcaactgaggaataagtgagcaggtagggggcagggttttgagtgggcgccggggttagggaaactgatatcagggcagtttcggggttcagagaggcaagagcgccctcaaacatggtgagagcggcagcgggttctttgataccgctcaaatcaaccactgtcaaagctgattgcttagttgccgatttaacctgagtttgcagttgagatgaggtagcggggaggggctgataatttgctatttttccctggttgtccgccaaaagtaatcctgcttgggggccgatggcctgggatttaagcccaaaggcttttaaaatcccctgcaactgtccccgggaagtagggtcaacctgctctttttgggagcctgcttgactaaaaccagggataccgtcgacttttccgcctgttatttttgtttgagggcaagtagtagatgcagccggggcggctccattttgaatagttagaacagcttggctcacgcaggtgaaatcagccgtggcaaccgtgcctagcattcccgcagtggcgtaacgttttagatccgagttcttagagaactctgccgaaacctcctgccaggaaatccccgaagttagcaccactaagaggggcgcgcgcttgcgcggcggggtataagtttctaaatcggggtaaaagacctgttgggcaggggtaagggctctcggggcaggttctggctcccaggtagtagccccggcggggcttaaaggtagagtaagtagcgtaaagaaaaggctaaatagaagggtgcagctcgcgcggacgaagtgcttaaccgttcttgccatagccatattctacggtcttgataggggtaaagcgcatctttcctagtatcgtgaaaacagtgaaaaaggaaacggaaatgaatactgcgataaaaagctatgcgttcttagggccggtgggtactttctgtcaccaggcgctgctccaagtggcacccgctgacgcggaaatgattccctgtgctggagagcgcctggccatggatatggtgcgcactggcaaagctgatcgggctgtggtacccatcgaaaactctatcgaagggggagttagcgccaccttggattctctggggtgggataaacgcctgcagatagtagcggaaatgatagttccggtcgggtttactttggcggtgcgcgaaggtacgaaactttccgatattacccgcatcggtacccactctcatgcttgggcgcaatgtcgtaattgggtggccgatcatctgccgggagcagtccacgtggctaccacttccaccgccgagtctgctcggatgctggctgagggcaatgctggttttcaagcagttctggcctcaacagcggcggtaagtacctatggacttaaagctctctaccaggacgttgccgacaatcctggagcagttacccgctttgtggaagtagcgaaccccggtcaggttccggaagcttgtggagccgacaaaaccaccattcaagtacgtttacccaatgactatcggtctggggcgctactagaaatgcttcagcagttctcggcacgcggaatcaacctcagccgtattgagtcgcggccgctagccggacaaccaggacggtatgttttcagcattgacctggacggccatattagggaagaacgagtgcaatccgctttgcgcggtctctaccgtatcagcgaggacttgcgtttcttaggttcctacgctcgcgctgaccaagtgcgaaacgaccatgctccccgaactggggacagtgatttccagcgagccagaggctgggtagattctattttgcgaaaatagctggcgaaggcggctgtcgattgtcgatgccctaaggtacccgtaccacgacggcgccgcgctctaaagaggcagaaatctcccggtaactacccacggtatcgccatctacctggatcatccgcgcctcgccgtgtaccttggcgctcgcggtgcgggtacggattacgtccgttttggaaactagacccgcagttagtttctttactcccagagtgacgcgaaataccccgctgattacctctaacagtccgatcaagccgccgcggacactcagcattaacacttctagccagccatcatgggggctcgcctccggcaagagcggaatcccccctattaactccccacaggaagcaaatagtagggtattgactttgcgcgtgcgtggatgcgactgccccccaaaagatacatccatggtaatcgggggtttgttggaggcagcaatcccggaaagcacataagctccccaaccgatcgattctttcagcttgtcagatacccggttcatgacctctgcgtcataaccaatccctgccatcactaagaaaggaaattcttcgccagtctcagttttcagcgcccctaaatcgaccccggtgttcttacccgtaaaagcgatttcgcaggcgcggggtaaagaattaatcggaatattgaggttacgggctaaaagattcccggtgcccagcggtaaaatccctaaaggaatccggctttcggacagactagccgcgataatccgcaaggtaccgtcaccaccagcagaaataaccagacctgcttcttgcctgattgcctcttgggcttgactagctcccaaagattcctggtcagtttctaagtaaataggttcttcatatccggtggcttgggcgcgctgggtaaccgtgttccgaaaatcatccagattcccaattttcattgggttatagatgactaccacccgtctagaggattcattgctgcaggtggcggtgggcgcagaaaatccctgtttaatcgcgagtttcattgcccgggtggcaatgcggcgggcattaaccgcccaatagaaagcgatgatccctaaaagtagcgccgcgattactaaaatccagagcacagtggtcatagctttcagtctaaaacaaaaccgggattgtcggggaaggccgatggggggagcgtcgaagggaagatgatagggggctttctcgggggcagataaaacctataaactaaatccccaggtcaaggcaagatgagaagcggtgccgggtgacgatatgattaaaacatgattgatattcgtcagctgcgtgaagatccgcagccagctaaagattcgctcattgcccgcggggacgatcccgcccgaattgatgaggtgcttgccgccgatgcgcaccggctcaagaaacaacaagactttgaaactatgcgcgccgagcaaaaggcactttctaaaagtatcgggcaagctgctcccgaagaccgcgcccaagtactggcgcaggcaaaagaactggcgggaagggtgaaagaagccgaggcagaggcgggggcagcttccgaagcggctcagcagctgctggcagcgctgcccaatattattattcccgggattccctccggaggcgaggatgactatgaagttctagcccaccgtggccctaagattcgtgattttgctgctgaaggcattaaagtccgcgatcacctagaaatcggggaggcgctgcaagcgattgatgttaaacggggcgccaaagtctcgggctcacgtttctactacttacgggggataggggcgcgtctggaactggccttgcttacctgcgcttgggatttggcggagcagcatggatttatccccatgaccactcctaccttggtcactcccgacaccatgcggggaaccggtttcttaaccgagcattccgaagaaatctactacctacccgccgatgacctctacctggtaggtacctccgaggtcgccctcggtggttaccatggcggggaaatcctggaactaggggaagagcctctgcgttattctggctggtctgcctgttaccggcgggagtccgggtcgcatggaaaagatgtccgcggcattattcgggtccaccagttcaacaaagtggagatgttctcgtattgtctaccccaggtatcgcaagaagaacaccagcgtttgttggctttggaagaagaaatgctgacaaaggtagagctgccctatcgagtaattgatactgctgcaggggatttaggaacttcggcggctcgcaagttcgattgcgaagcctggttgcccagccaggagcgctacctagagctgacctccacttcgaactgcactacctatcaggcgcgccgcctgggaattcgctatcgcgatgaaaatggaaaaacccagccggtagctactttgaacggcaccttagcctgtactcgctggctggtggctatcttggaaaaccaccagcaggcagatggtagcgtgtatgtcccgcaggcgctgcgtccctatctgggaggtaaagagctgctagagccagtagtgaacgcgaacgcctaaatctgggggcaaagcgtgaaaagatagggcacaggcggtctcgaacacaccaatagttaccgacaggacggagaaaatcaatggctgatcatctgcagtatcctcagggagattatgtacccacggtagtggagcgcgctctcgccctttcgcgcagctatggggaagatatcgctaccgcggcagtggtacccgaaaatgaccgtactcgggtgcgttttattgcctcccaagatggtgctatctgtggaataccggttgcccgcgaggtgctaacgcaggtgttgggcgagtacgatttgcatttgcgggtagctgatggcaccaaagttaccgcgggaactccgattctagagctaagtggcaacactcgcggactactcgcagcgggggatctgtgtctctggtttttgtcccacctatctgggattaccaccaagaccgcgcagtgggcagaagcgctttcgcaaacgaaactggtggtgcgagatacgctttcggttactcccggtctgggagaactagaaaaatatgcggtgcgcgtgggcggaggaatgacttcccgcttgggaatagggtcattccccctggtaagggctacccatctgcatttaggaagtggactgggggacgttatgaaccatgtgcgcgctgcagcagcgggaagccccatccaggtagagatcgaccaagtacaagatcttgatcccctgctgaaaatgcgagtagagttgctaactttgcggggatttagccccgagcaggcgacgctagctgctgatcatcgcgatactctaaacccgggaactttgttggaagtgagcggggacgtgagccttgaggaggcggcagcctatggcgattgcggagtcgattacttggcgctagatggtttgaccgattgcgtgactcccttgccaatcaagatggaattcgtttagcccgccctaagaaagaaaaacaaggagctgaataatgttctggttcgattcactcgagcataaccgctggctgtctgcctgtttgcaggatctgctggattatgggcgcaaatcggaagtgaaaaccgggtttgcctgcctagaccgcgatggcgaaatcgacttggagcagccgattcagctttatttgaccgcgcggatggtacatgtgttttctttgggggtgctgctggggatgcccggttgtcgccggttggtagaacacgggattcgctgcctcaaccagtatttccgggacccggaaaatgggggctggtttgacgcgattgaacacgaactagacgcggacggacgggcgattccctatgaaggccgcgacgataaacgctcctattcgcatgcattcttactgttaggcgcagcttcggctacggccgctgatcgcataggtgcctatgaattaatgcaagaagctatccgcgataatgatttgcactggtgggatccggaatttgggatggtgcgtgaaagctacaaccgggattattctgagtgtgaagattaccgcggcatcaactctaatatgcatatggcagaagcctatatgctggtggcgcaggttactaatgaaggagaatggctagagcgtaccctgcggatcctggagcgagttgcccaagtttcccgcgaatatagctggcggcttccggagcattttgatcccgactggaaacccctgctcggttacaatcgtgaaaatctgcaagaaacccatcgtgcctacggcagtgacgttgggcattcctttatgttttctcgtttgatcctggaagccagagcgatgctaaagcaagcgggcaaagaggttcccgagtggatgatgccggcggcaactggaatgtttgagcgggctcgcgaggacgcctggcgacgcgatggggctcccggttttgccttcaccgtagattgggagggcaaaccagtgatccgcgatcgtcaatcctgggtacagtttgaggcaataggcgcggcggttactttgttgcgggtggcccaagaagaagacgctgaggccgaagacgtggaacattatgaacattgctaccgggcatggattgattttgcctacgaacatttcctggtgcgtggggggcggattgtccatcgtctttccccagaaaataagcctctagatttagagaatcaaagactacgggacagtgtctatcatgcggtgcaggcaatgttgttgccccgattgccgctaactccggcatttgcgatggctctggcgcaaggacggttagataagcccctcccgcaagaaccgcagcgtaaaaagaggtttggaggattttgattctcggatgctgcctcggtagcataaagcttgtgctagcgctttagcgtaggccaggagagttgtccgagtggccgaaggaggcggtcttgaaaaccgctgtaccgcaaggtaccaggggttcgaatcccttactctccgctgaccagcagttattgtggggttccggctatcttcctccagtaaacatctttgagcattttgcaggaaatatccgatcaaatagtaacttcaaagcccaacttgccaccactatgccaagaatttggaaaagtttgagtgcaaaagtttccaaatcgttaaagggaccaaatgggttcagtagtggaaggatgaaaacttcaaatcctgggattagtacagggttgtggattgcgaatatgtaaaaagcgcaatcgaaaaatttcggcatatctttcgtaagccacatggagttaagggttagccacatccctaccagctgcagcaatccataaatcacttctggtaacagtgagggatagacatgccaaagtaacatcgtgaatccggtaaggaaaatacctaataggacacaataaatattgtttgtttttggtttcactattaggtttggccgaatcgctccgatatatgatcccaggacgtaggtgggtagatagttaatcatatttccgtaccaccaccagcggtggaaactccaagggactgagatataaccgagatagcgagcaagccaatatccgataatagctagcgcaattactgttagcagcggtttattcttgattcgcactactagaggagctgggagcattaggatcaatagcgctaaacaataccagagtggtccggctatcggggaacagaaaaatagatccaaggggttaagatacttttttgcttcttgagggcgaaccagagctactaaaacaagaacggtaacctgccagagcatgaatggaatcagtagcgatctgactcgagatttcattttgcgccctatggaggagggagaggcattgaaatagagtaaaaatccggaagtaaaaaagaaaaaactcattgaggtgtagcccagttgattcgctaggaccaaataggatttcgtaaggattccccagttagtttccggactgttaaatgcagccaaggaattggtgtgataaataactattcccagggtaaatagccatctatataaattaatcttccgggaaacggttatatccatcctgctccctcaacgaaagttatggaccggtctagtttctataagtaacgaataaaacgtagaaataatattacattatgcccgctggaaccttactaagtacaccactcaaacctgattagggttcccaaggtttgtagattgttccgtggcaacactggcgggaattgcgctttcttcacctctggggtggggcagtggtggcgcggactattagctccgtgggaatcgtcaggttcagattctcagtttccccttttatctgccggtcaattaggttaaccatttccactccggccgtataaaagtcttgtttaacagtagtcaggggcgggaatgagaactcagaaagttcaatcccatcgaagcccaccaccgacacgtctttaggaacgcacacttctctttcgtgtagcgcccggattagtcccaaggcgacctcgtcattagcgcaaaatactgcggtgacttccgggtttttcgccagctgcttaccggcttcaaagcccgctttagctgaccaatcaccggggatgactgccggtatttcccggttttcctgggcaagcgtttctcgccaaaccttttcgcgcactcgcgcggaacgagaatgatctggaccgctcacgtgataaacggtgcgatgtcctaaatctaataggtggcgcatcgccgcgcgtactcctcctacctggtcagcagaagctgaaggatagatatccaccaggtttgaatccgaggaggcgaccggaagattagcggggagggagagttgctcggcatctgcatccccggcttgcacaataaccaggccgtcaatatcttcttgagaaagcagcgacatagcctgctggacttgcggagagttcgggtgctctacctgtaccaggcttactgaatagcccagctgacgagcccgatcaaatactccattagcagtatgtgcttcgccggtgcgccgaatttcttgggtcagcagcccgattacttcataagaaccggtgcgcaaagcgcgggcagtgcggttaggtttatacccgagatcagaaatcgctttcagtacccgctcccgggttttgggcgacacgttttggtgcccgcgcgccaccctcgaaacggtctgcgcggacactttcgctgccctcgccacatcgtgtatggaggcagttctaatccctcgcttattttttcctgccacgggtgaagcgtaccaggtgaaaacaaattccatttaggacttgcccagcttcaacatgtgttatcgttaccagtattgttgtcatcgataacaccaaagtcggtgtggactgcaaaccgtaaaaatcgcattcataggagaagtaaatgcagttaaaggttcaccaccaagacctaaaagtcttacacgaaaataccctcccggcgcgcgcctactatattccgatttcaccattgcaggccgccgcggtgaccaaccaaggccgcaacttcaacttggagcgcgaagaatctgaacgtttccagctgctgaacggggagtgggactttggcttctacccgaacctagaggcggtaccgaccgatttttttgcccccgcagatcccgcgctcccggcgcggattccggtgcccggctcctggcagcatcatggctacgatcagcatcaatacaccaatatcaactatcctttcccccttgaccctcctcatgttccccataacaatccggccggagcttatcgccacacctttaactatgaaaaagacacgcaggcacctgccgccaccttggtttttgagggggtggattcttgcttctacctgtgggtaaacggaaaatatgtgggatattctcaggtagcgcacgctcaatctgcgtttaacgtcaccgaatatctgacagagggcgaaaacaccctggctgtgctggtatttaaatggtcagacggctcctatctggaagaccaagacaagttccgcacttccgggattattcgagatgtttacttgcttaagcgcccgacctcgcatcttaatgattattttgttactaccgaccttaaagataatcaggcagaagtaactgtgcgcgccaacttcagcggcgaagccctgtcggttaccgccaccctgagtggcgctgagggcgagataggcagctgcgccctcgaaccctttgaggatccgcaaggtatctatacccactgcgctacgttcactatcgagaatccccgtctgtggcaactcggcgacccttatctatatgacctggtgatggccagcgaggcggaagttatcatcgaaaaagtaggggtaagggaagttactatcgaggacgcggttctaaagtttaacggcagccccatcagaattaagggggttaaccgccacgattctgaccccgataccggcccggtagtatctatcgagcacataaagcgggatctagagatgatgcggcgccataatatcaacgcggtgcgcactgcccactatcccaattgtccccagttctatcacctgtgtgaccaggcgggattctatgtgatgagcgaggctgataatgagagccacggtacccggaaccgcctgctaaaagatgaatctgaagaaaatattgtggagcattggaatcatccgattgccaacaaccccgattggattgaatccacgatggatcggatgcaactgtgcgtgcattcggaaaaaaatcgccccagcgtattttcttggtcagcaggcaatgaatgcgcctttggatgcacgtttgaagaaagcttggcttggacaaggaaattcgatcccagtcgagtaacccactatgaaagtgcgttctatcggtctaccgaccgcaaatatgactaccaaaatatcgacctgtattcgcggatgtatccgtcgctgtctgatattgacgattacctggaaaagttgggagataaacccttcctcttggtcgagtactgtcacgccatggggaacggtccgggagatttagaagagttctgggagaaagtgcgttccgatgcccgtatgtgtggcggtttcatctgggaatggtgtgaccacgcagtacgcgatagcgaagggcatctactctatggcggcgatagcggcgaagatccccacgatgggaacttctgtgtagacgggttggtatctccagagcgggtgcctcatatcggtctgctagaagccaaaaatgtctatcgtcctttgcgttgccaatatgatcaggaagacggaaaactactggtaaccaacactgccgaccatttaaacgctgcggagttcacctccttgcgctgggtgaaagtggtagatggacgcgaagaaaccggcactttggaagtacccaatttgccggctcatgaaacggttaagattcctttgcagctagacgtgcccgcgcaggggcgctgctacctgcgggtagaaacctacttgacccagcccttggcattcctagaagccggacatttgctggggtttgacgagttcgccctcgagaatcccagcccgcacactccgtgcgccctcgagctactaaaagtggacaaccaggaggagggcgtggccgagataaaggaaactcccctagagatttgcgtttctagcggggattacacttaccgtttctcgcgtcataccggaatgctgaccgggattgagctaggcggaaaagaactgctgcagcagccagcagaactaaatatttggcgggcgcccaccgataacgatatgtatattcgccccctctgggagcgggcgcgctatgaccgcgcctacccccacgcttatgaggttcgtgctgatagcgaggctcggggcgcggtggtaagtgcgaaagtggcgctggtgtcacctagcttgcagcctttactgaaagccgatatcgagtggattgtcaggccggacggagctttgcaagtagacgcgaaggtatgccgggacacccagttccccgagctgccccgcctaggcttgcgtttcttcctggataaatccctacagcaggctacttgggcagggcttggcccgcacgaaaactacgtcgacaagcgccgctccagttggcacggatattttgaatcttcggtgggcaatttgttccaaaactatttgcgtccccaagaaaacggaacccgctcggactgcgattatctgcgcctttgcgggaaagaactaacggtagaagtagcaagcgaggagacctatttcttcaatgcttcttactatagtcaggaggaactgaccgaaaaaacccacgaatatcagttatcggaaaccgatagcaccattttgtgtctcgatcatctgatggcagggataggttcggaaagctgcggaccgaaactcctggaaaaatatcgggttgatttcgagaccaccaaattctctttcactattaaattttctaactaattaaaggaaaagataccccatggaagaaaagaaataccttaagtggtacaacaaagtaggttatggctctggtgatatcgccggtaacgtagtctatgctttcctgtcggcgttcgtaatgatttaccttacggacactcttggtttaagcgcgggaatcatcggaaccctgattatgctgtcgaagttctttgacggattttctgacattattttcgggcggttaatggataaaaccgatacaaaaatgggtaaagcgcgcccctggatgttctatgcattctttggttgtgctgcgatgctgatagcgatttacgctatccccacctcaatgggtaaaactgcccagtatgcttggttcttcattgcctacaccctgttgaatgcggtgttctacacggcgaataacattgcctatgcggcattgactgcgctgattaccaagaaccgctcagagcgggtgcagatggggtcgattcgcttcatgttcgcctttggcacctccctcacgattcagaccattaccgtaggtttggtgcaatggatgggcggcggtgccgctgcctggcgaaatgtggcgattatttacgcgataatcggtatcttgtccaacactttggcggtgttctcggttaaggaactttcccacactgaactggacgatggtgatgaagaggcggccaaggatgaccaggtttccttcctagaagcgctgaaactgatgggtaaccgctactacgtgattatcgtagtttgctttatcttgatgcagttcttcaccgccaccctgaatatggggatttactttatgacctatattttggggaatgctaacttgctgggcgtttttgcctgggcaatcaacattccgctgattgtgggtctgctagtgaccccgctggtagtctccaagctgggacggatgcaaccagtaacggttgtaggttacatagtggccgtcctcgggcgtctcggggtggtgctgggagcctccatggggtcaatcccgttgatgctgttcttctccgggttagcttctctgggtatgagcccgttgcagggaacccttaacgccctaatcgcagagatcagtgagaacaccttcctgcgcaccaagaaacgcattgacggcatgatgttctcttgttcttctctcggggtaaagatcggtagcggggtaggcaccgcagtcgccggttggttgctagaggccggtggctatgtcgggggcgccaaggtgcaggttgagtccgccctgcaaatgattaagttcatgtacctgtgggtgcccacgattgctaacctgttgatcttggtattgctgttcttcttggacgttgaaaagaagaacgaagtattgcttgctcagctcaaggaggaggaagcggccgcgcttaaagctgcctctccgaaagttagcccggacgaaagtactgcagagaaaatagcgcaaggacatgccatgggcggctcgggagcgaaagaatccgaggggcttaaactagccgagttggatgaggaaaaactccccaatccagatgagttaccggatgtggtagaccctgatgataagcaacctaagggagatggataaccaccagtcggcggcaccgcctagagtgccgagacggcagctggtttaataaaccgtaacattccgccgggtgaaactaatagggtttcacccggcggaacttatttttacgaaatatattactgggtggcgatatttgcctgtttacagcgggaatggcacgtttaaccaggtttagttttttagcacgcgggtgcggcaaaaactaatatctgagcgagaattccgctcctattccacttttccggctgttggtgaaggagataccgagaggaatcggggctggttgaatccggctttgctaaaggcttccaccacggcactggcagttgcttccacctgatcggtggaaactagggtaatcgcacatccgccgaaacctcctccggtcatccgcgcaccataggcaccagctgtacgagcagccgctaccgccacatctagctcttcgcaggaaacttcgtagtcgcgctgcaaagaatcatgggaagcatccagcagtttacgccattcatctaggtcggctcctgcctctaaaagttcgcatagccgctggcagcgggcaatctcggttaggacgtgccgaacgcgcgaaacttgctccgcatcctctaatttatccagctgctggcgaacccaggtgggaggatagtcatccgcatccagatcggtgaggttatcggtgggggaaatagtctggggaaccagttcacccagctcctttacccccaaaatacgggcagcgtcttcgcaagtcgctcggcgcgctccgtactgtccatctgccaggtcgtgggaagtgcaggtatctattaccagcaaagataatcctagagccggcaaatcaaagggatgggagcgggtttgccaagtggcacaatctagctccaagacgcagtccttttcgcacagcatagaagccgattgatccaggcctccggtgggggctcccacgtaacgattctcggcaagtttgccggctgcaactagcagcttgcgcccttcgttacttcccgccaacccgaggccggctagttcgtcaatccccactgcgattgcgcactctaaagcggcagaggaggatagcccggcactaagcggcacgctggatgccaccgctacttccagtccgggaattttttcttgcagtttttgcgccgcttcttcctgatcattgtccctcagtacctgcgctaaccccaaaatcacgccgcctacgaaggctccagggccgctagcgggatagtttttttctaaatcggaaagctctaggacgctaagctctgggaaatcttcggaaataatttttagttggtcatcttcgcgagccctaagcgcaacgtagatagcgtgggggagagctaacgggagggctttgccgccgttgtagtcggtgtgttccccaatcacgttcacccggccgggagcgcgccagacacctacgggggccgccgaaaaagttttttcgaaaagttctcgggctcgtcgcgcaccctctttaggttggtaagcagagataaacttgggttccatgttcacgttagcacctcattgttattactggtgaaaactattctaccttttgtctaggacgcgagtaggggcgtgtagaaacaattttttatttcgctaaaagtattagcgaaaacagtaagaactaagcgtttccgtaggctcagcaaaagctaaaacagtaggcgggagagacgctggcgtgccagtttcactgcgtcaggattgcgcgagaggcggaataactccagcaatcgctgacgatactcgtcgcgttcctcatcggcggactttgcgattagagaaagtaataagtcaaaagcttgcggttcattaccggcttggaaaaacttatcagccaggactagaggatcagaatcatcttgaccttcctccgcatgtaaccgctgcgccatggaaaccttgtcgactagcgcctggtagcgtgctgcctcctcgggggagttacgcagcagcttttgtgcctgctccagcgcctcttcaagctttcccgcctccattagtgcttcgactgctttttcttcttcggtgcggggatctgcttgacgggcatccgcctccccggccatctttccagttagtcccgcctgcgccgcaatctgtaaaacttggtcgataagcggtttaatctgggctttcggttgggcgccttggaaaaggggagcaggacgccctccgattagcgccaccaccataggaatggattgcgcctgaaaagcttgcgccaactggggagattcatccacattaatcttcaccagttggaatcgtccatggtattcgcgggcaagctcttctaatatcggaccaagctgtttacaaggtccgcaccacggcgcccataaatcaataatcaccggcactttgagggaagtttccgctacctgatcaaaagtgtcctcgctggcatcgcaaataaacggtccgggaaccacttcgctgccctcagttgcagacatcggtactccggcgttagcaaaatcgtcgctacctgcaggatctacgtgttgtccctcccggggattctcagaattattactagcgaactgagaaagatctactgctccatgcgtttgcgccaattgaaaccttccttactttgaggctgccgtcaatacttcggaggctgccacgacccgaatcttcccatccttagtgttcttgggagggatctgcatcaatacacagatgatccggttccaggtagctttttccgtaaccttgccattatccagcagattaaccacatctccgctgagggtaatgggtttatctgaggatacatccgtcaggttaacttcctgggtgtaggtagcagccactaaggcgccatttttcgcgggcaggtcaatcgctaaagtattatcttttatttctaaaggactaatcgaagttgcaactttcccggcactgccaaccccatctttgagggatttcagttcctcgcgtttgccctcaatcaaaggatcgacaaacaccttgtccgcattttttgccttctcatcaaacacggtagcggcccaggtgtttatagccacttctggagaaagcagcagtcccgaatcgctctttatatccagagttttggatccgcgagccaccacgtctgtttctggtagtgatgcttttggtagtagctgcatccactgccacaactggtagggttctgtcgctttgctctgccggatgacctctacatatttagcgccgtttttatcggcaccagtaacatttattaagctccgtggccagctgtttccagaagtaacggtggctagttccgaggaagcaggcaaagtcgttggggaggagctgctgtttttctggtgcattttgtattgcgcactgcgcatttctaatgccggtcctgccactcgcccgccgagatctttggtgtcaaaactcttgtctccggcctctagggctgcgtttaccgctttgagcaccggatccacctgctcggttcgcagcgccggataagattgggttttagtaggtttagggacctctttgcgttgcgcattagtggtacacccggagaggctagccaatgccagggtgcaggcgatcgccgtgctcaataggattcgtgtgcttctcattgttgctgtcctccttggctctggtcgaaagtcgatttcccttcaaagtcgccaatatcagggccctcgcctaaaccgtccaggtcaaagtcatcattctcgaaccattcttcggaacccccagctgcgggggctgattgctgtggctgcggtaccggttggtaggactgagcgggctgatgggagtcagccgggttgtaggaagtcttcggctggtaagaggctgccggattatatgaagcctggggttggtaagactgcgccggttgcggctcataggactgcgctggttgataagaatccgccgggttaaacgaagcctgcggctggtaagactgcgctggctgtgcagattgcgccgggttgtacgaagcctgcggccggtacgaatcggctgggttataggacacctctggttggtacgactgtgcggcttgcggttgcgcagactgagccggttgcggctcataggactgtgcgggattgtaagaagcctggggctgataggaatcagccggctggtaagactgcgcgggttgcgtcgactgcgccgggttgtacgaagcctccggctggtaagaggctgccggattatatgaagcctgcggctgtggggactgtcccggctgtggggactgagccgactgaatatctgctgtcgctgcaataggagcagatggcgtggtttccgcaggtgccggaagttccacgttgctaactgcagggcttaaagaaacccgttcaacgggagttggggaggcagcgacctccggatttatcgccgtcccgtcctcatcggtgcggatcaccggcaccaaaccagtggggaacttaaccccatcaacctcaatagtggcttctccgcgttcgcgtgcttttcgtaaggccgcgcgcgaaggaggatgagcaaccgcatttagcgaaggcatttgcacagtttgcgctgcctgtgccgcagccgcctgctcagcgcgctgcttgcgccgcgcccgtacctgttcctcttccttcgctgctgccttcgccaaacggttgataacaatcgcaactaccgcccctattagtactaaaagcagacccgcaataagcagaggccagaaccaaggagtcgaaaccacctgagtccattgcagggttagctgaacatttccttcctcagaacaagcaatcagtgaccaggcgccctcagaccgatcccaagtttcggtaatcggacctccctttacctctttatatttcacccacatatctttgccggctgcttcacctggttggcgagctttgcctttaccggggtgaggttcggttaataaggtgtcctgatctttttgtccggtaacttccacgtaattttggtcagctgcccaagcagtcacatccgtagagcgaccaattgccagtgccacctttccttggccagaaacggtaattttggtgggggagtcataaagctcaaacattcccgggcgggtaattgccattgcttgcttactagcagcagtgggtaaagatgttacaacccgcgaagacggcttccagatagtggcagtccccactccgcacaacgccactatggaacctacaattactagtaccagcggcagccaatatctgcgtaatattttgttcactagtttcccccaagccgaattttgagcaactatatacactgtactttctttgccgcgtccatgcttaaaccttgtgacgggtgtgactagggtcaattttagatgaacgtttggtttcaggccacaataagtgaaagactaggcattgatacggggtttcgcggtatctaagttatggaataaaatgtttcaggtaatgcgttatctcagcggctcatctttagggaggaccaggtggaagaacaaactgatttcccgatcgtaatgcgcggttacgatcgcgttcaggtcgatttgcaaattcagactttgaataaccagattaccgagttgcagcagaagctcgacacggttgatcagcgtaacgtggatttgggtgaacagttggcagatgcgcaaaaccaattgcgctcctctgaccgcagctcctataccggaatcggcgcccggatagaacagttgttgcgcagtgcggaagaacaatcaacagcggtgattaacaaggccaatgccgaggccgagcagctgatggataagacccgcaagaacgcccaggatatggcagagcgggcagaggcggaagcggcatctctgatttcagaggcgcgtcgtgaagccgaggaacgcaccactactgcggcaaccgaatccgagacggtgttgaccaacgctcagcatcgggcggacgaactggtggccgcggcagagcgcgaagcctcttcgctgcgggctgaaaccaatactcaagtttctgacctgaaagcaacggttgaccgggaaactgagctgcagcgcgcccaggccgagaaagactacgtagagatgcgagtcaaggcggagcaagaagcatcccagcttcgcaacgatgccaccgcagaggcgcaggcactgcgcgaatcttcgctgacagaggccactaagactcgggaagaagccaaggcacaggcagaaaagactctggctgatgctcgcacccagtccgaaagcattttgaaagaggcacgggaaagcgctgatagcatccgtgccgagattcagcagatgcggcaagaggccgaaactgagattgcggcggcgcgggcggcagctcgcgaagccgatgcccaggcgcatgagcagtctcgctccgaaacctccgctatggtggcggcagcaaaggctcaggttgccgacgcagagaaacacttgggtgaaaccttgcagcgggcagagcgtctgttgaccgacactgacgcggttgtgcgtcgccgtcaggaagacgcgcggcgggcggctgaagccacgattgcagctgccgagggcgaagccgagcaggtacgtgaagctgcccggatcgaagcgcaggccgagcgggctgcagcgcagcgcactgtggagcgtttggagcgtcagcgcgagtccattgccgcatacctcgaagagatgcgcggcctgctaggtaccgaaactgcaactgggctagaggggctaactcccatgcagcagttgccggcggtgctggcgcagtcggaagaagaagccgaatctgaacaaccagctccggtagctccgccggtaaatccggttactcccgatgaagagtcggcagcaactgatctgtttaccagcgaggactaataagttcacttaatcgcatctgggcgggtctttggaaaaccaaagacccgcccagatgcttattgtcttatttcttgaggtcttgccgctatcggtctgcgcaagaactcgccctattggttaatcgagtttgaagatttcacgcggctgttcatcggttagccggtgaatccaatacttagccgaggagagtggcaaacgtccttcacccacgtatcgagcaaggaaagccgcatccagtcggcgattcatatcgtgacgtcccggtatagatagaaatgcccgagtatcgtcaataaaaccggataatctggagaacccggcggtttccgtagtggaggcatggaagcgcagaatcaaatctggcgaatcaataaaccaccagggcgcaccgatgtacacgctggaataatagcctgccaaaggcgcaatttcgcgtgagtacaccgtctcatccatggtaaataacaccagatgcaaatctttttcattgccgtaacgttctaagagcggacgcagcgaccgggtgtattcagtggcgaccggaatatcatgtccggtatccgccccgaatcggttgaatgcggccgttgaatgatttctaaatacgcccggatgcacggtcatcactaagccgtcctccagactcatctgggcaaagcgggtcagcatcgccgcctcgaaagcagcagcttgttcgctgctgccctccccggaaaccaggagcttcagcaagccctctagctctgaatcatctagatctagggctgccggttgtgccactccaaagtctgccgaaactgctccgtgcttaataaaccggcggcgactttcccgcagggcacgtagataatcgctaagactatcgggcgctccgccaacgctagcggttagcgccagcactttttcaccaaactctggtttacgtgcgtctacatagacatcgggacgccaagagggagcgacacgccctcctaactccccttgggaagtaagttttgcgagttccgcatgggcgtccagaggatccagaggatcgtccgtggtagccagaaaggcaatcgggaaggagttgaagagggcgcggggagagaagttcgcatcgtgtagacgctctccgatctggtcgtagagggcatcagcgctttgagtactcggctcccggtcgatgttaaaaagggtgacgaactcgtgggtgagccagtaacccgaggcggttccgtcgaacaggtgccagttcttgcaaaaaatccgccaggcttcacgcgggttggtcattgctactttgcccacgccgatttcatttaaatcgattcccgccgagttgagcaggcgaaacacgtaatggtcgtaacgtaaaaacagttccgaagcgttggggaaaggttcgttatctaggagtagctggggattaacgtgcccatgcggggaaataatcggcaagtctttaactgtttcatagagttctcgagcgatttcccgagtggagggttccaccgggaatagtcggtcaggatctagggttaaagtttccattcttatccttttatctccccgcgatgggtttgttatctgtggtttggcggctatcgcctgacccgtgctgaacccccggcgactagattctcaacttcagccaggcttgccattgaggtgtcacctgcagtggtcatagccagggcgccatgggcagctccgtagttcaccgctttttcgatgtcaccgaactccatcaatccgtagataagcccggaggcaaatgaatcgcccccgcctacccggtcaagaatctccaggccatctcgttgggtagcttggaagaatccctgctggcgatcccaggccaccgcgccccaatcattgatagtcgcagtgcggacctgacgcatagtcgttccgatgcattggaaattcgggaaggtctcccttgcctgcttaatcattccctggaaggattcgacttcgagattgtcaagattttcgtttgcgccctcgatttcaaaaccaagagaagccgtaaagtcctcttcgttaccaatcatgacatctacgtattgcgccaagtctcggttgacttcctgacatttcgccttgccaccgctatcggcccataggctaggacggtagttcaagtcgtaggacacgatagtgccgtatttcttcgccacctgcatggcggtttttgccaccgctgcggtactttcagacagagcggtaaacactccgccggtgtgtagccagcgtacccccagtttcccaaagagtagttcccaatcgatatcctccggctgcatctgggaagtcgcagtgttcccgcggtcactgcagccaacagctccccgcacgccatagccgcgttcagtaaagttgatactgttgcgcacggtgcgtcctaccccatcaaaatccacccatttgatgaaggaggtgtccacgccgccttgcagaattaagtcctccagcagtagcccgatctcgtttttaaccagggcagttacgatagcggtgcgccgagaaaaggctcgccgagaaccgcgtgccacattgtattccccgccaccttctgaggctctaaaaactctggaggtgtgaattcgtccttcgccggggtctagccgcagcataacctctcctaaagacaccacatcgtagcgacattctgaggcaggacgtactttcaagccactaggcctgtccatttttaatctcctttactttagcgatagcttctgcacttagccgagtaatctcatcgaattttccggcgtttataagtttggcgctggccatccacgagcccccaactgccggaataaagggtgcactaagccaatcacccaggttctcaaggttgatgccaccagtgggcataaactcaatttgggggaagggaccggcgaaagccttaagtattcccaggccacccagagcggttgccgggaagaacttcacgattttcatacccagatttgctgccaccataatatccgtagggttggcaactccggcgagatagggcatttgggcttcgtcggccgcttctgcaacttcctcggaaatgcccggggaaactagaaactttgcccccgccgcgatcgcggtttttgcctgctccttattgatgacagtgccagcaccgacagtcatttccggtacttccttagcgatagcggcaatgcaatctgccgccaccggggtgcggaaagttacttccgccgacttaattcctcctgctaggagggcgcgcgcagtcgggatagcatcctcgaccctgtcgagcaccactaccggcacgatggggttctctgccaaaagtggcattgctgaaggtatattcatgttcttctttacctctatttatcctcgtggctttttacaatcgcttcccacagccctccgaggtaaaccgctcccagcgcccggtcatagagggggtatccggggcgtccagtttcactccaaatcatgcgaccatgatcgggtcggatatggacgtccgggttggtttcgtagatagcttccataatggcgtgcatgtctaagctgcccgtcgaagatgggtggggagcttcccggaatcgcttgggacccaggtactttacgttgcgcacatgagcagcgttcatcaagccacgtttaccgaattcgcggaaaatcgcgggaacatcattatcagggttagaccctaaagaaccggaacagatacagaaaccattgaactcggaatcatacagacctgctatcttatccatatcgtcgcggttccgatagatacggggcaacccgaataaatcccaagccggatcgtccggatggcaggccatcttgatgcccactttttcagcagtaggaataatgccttccaagaaataccggaagtttgcgcgcatctgatcgtggtcaacttcctcatacttcgccattaccgaatccaggtgcgagagacgttcgggctcccatccgggcaaggttaatccgccggattctttggcggtgagttccacaatgtcgcgcggggtcatcccttcaatctgggcgtgatcgtagtagagacagtttgaaccgtcctcagtaacgtgtgccaactccgtgcgtaaccagtcaaatacgggcatgaagttatagataactacttttaccccgaactttgccaggttttctagcgacttgttgtaggcgtctatgtatttatcacgagtgggcaagcccagtttgatatcttcgtgcacatttacggattcaataacttcacactcgagcccggcggcatgaaccccgtcaatcaattctttgatttcgggttcttcccacacttccccggcagctttgccgctcaagacgcccataatcccagtcatctccgggatttgtttaatatactgcagcggaattggatcgtatccttctccgtaccagcggaatgtcatcttcatttgttgaactccttatctagggttgaacgcacggcaccggtgccggcgactaattctttaaagtatttttcggtcgcctccgccagtggcgtggcgtagagatcggtgcggaaaatatcagtgtcagacaggattggctgcagtgcctggtgaatttcttccgcagagttgctgccatccagtttaatttccgcaacgtgtttgtgtagttcttcgtacctggggtcaggtgctggttcaaacgggaggccgtcgtcaccgatgcccatcaggaaacgacaccagagagcaaacacaaacgggattgcccgcaaggaatctagatctagatcgcgttccagatacttcttgatagtttccccgaaacggatgggaatcttttgcgaagtgtccatggcaatccgagcgggattatctggcaaatacacgtttggaaaacgtacttccaccacttcccgcagaaaatcttccgggtttaccaccaccggatccgtaactaccggcagaccttccttaaaacctaattcgttaacgagggcgcgcagtgcgggatcttgcatttcggaatcgatagtgggcatacgtaacagcgaaccagccaccgctagcgcagtatgcaggggattcaggcaagttgtgactttcatattttcaaagtcatcacaaacctgacgcgctaccacctgcactccgagatcatcccaattaggacgtttaccagcgaacttgtcttcaatgatcaggtattctaccggttcggtattcacaaatccggctagcggagtacggcttggagtttccaccgccatatcgctaaatccgagtttttccagtttttcggctatccctgggttggggcgaggagtgattttgtcgataaccgtaatcgggaaagccactttcttctcgtcttgaagccattctaggaaaccatcgggcgccgtaccctgcttcgaccagccctgagcaattctcagtaccgattcgcgtaacttatcaccgttatgcgaaaagttgtcgaaacttagcaaagtaataggggctccaccagcaataaaacgctcccgcaataagacggcggaaagtaccatggtagaagcttgacacccctctaatcctccgggattatcggtttctatagcagcctgaacgcctggctgcaggttcccggagccatctccaataacgtagcctttctcggtgatggtatagctcatgagggcgacgttggggtcgcgggcaacctcaatcaaccgggagagttcctcttggtcgcgaatccccacggcttcgctaatcccggccaccactcgcaaatcctgggtgccatcaggattcaaagtaactttcaaagtcatgagatcatggtcgcccaactgggaatccatatcttcggggtcgcgaggagcaactgcagtaatcggccaatgttccccgcgctccaacaaatcggccgctacccgcgcgggatagcacctgaacaagttacccggcccgatatgaatccagcgaggacgcttcttgccctcctgctgcattttcgccacgtcaaagtggggacaactaatctcgggggtattggttccaatatcttccagtcctgccaggtttaacttcatattttctcctcaatctatccactaattctcgtaattctgcaccgccaactggggctttactgtctattatccccggtttcagcgggcagttatgaaaaatgccattagttgccaactgggattgccaacattaattgatggttttccaggggggagtggccggcagcagctggttaaagtctgctatcaactgatcttgatagtcgccgcggaaagttccttccaggaaacggggtaaacctacgtcgtggaactcttgccaggactcggcctcgtgtccggggcgaatcgggaaccataaagcattattatcgaatgccgcctggccatcaccgggagcatctcccagcaataaaatccgatccgggtgatactttccaactgccgcttttgctagctgctgcgatttggtacccatttcctgtccggcaatcaccgacatatagcgttttaggtcatgttcttcccattcatggttgagcatttgcagcgaggcggcggaaactaccatcgcatccactttcccctgcatggcctccaacgcttcgcgaaccccatggaaaggtgcgcagttttttaccatccatgccaccagcttgtttacggtttccccccacttaatacagcgttcgatttcctctgaaggatgttcgtcggcccattggtggattcccgcttcgctaagcggcaatcccgaggttacgaaaccatggagttccttgccctccggaagttttaccccggattcgagtacctcgggtcgctgcttgagaagatcaaacaggagatcaagccctgaccaacggttaatgcctcgatgaatcgaaaacaagttcatataaatcgcagtttcgcgggttagcgtggagatagcttgcaggtcaaaggcttcgatatacgccggagtaaaacactcgaagtgtttaatattcatctggtcgatggcgcaaccatcagaatcaaccccgataaaatactcggtcttcggtacgaattcctctagaatttttgcgtcgctcactaatgttcctcctagatgcgggtatccgcgagcccacagaaggcatcaaccggactgatccctttaaactcggatttaccttccagtttgtctaccagagattccaaagtgaaaggtttatcgtcgtaacagttgatataggtcctgacctgcggtacgtccaccaacgcatagggcgtagcggtagaaacatagatagtgggcagttcatagacataccagggaatatccaccgtgcctttcgtcgccggccacatcactctttctgtgggctgcatcattccatcaatcttggaaatcagaagcaccagatcataacggtcagtaaggtctgcaatcggcgctttaccggcatagacattcttgactgcttcgccctgttcctccggggtcatctcggcgagtttgtccaaaagagattcgtgacgatccacttcgtagccccgttcgcgcagtatttctgccacccgatctgcagggtgggtagcctctccgccacctccaaaagctcgcgaaatcggattttgcggcccggaaaccgaaactaccaatactcgccggtgggtggcgggagaaatcggtagcttttcgggctgcttatgcttgaccaaagtaatggaatcttcggccagccgaggcgccaccgccgtgttttcaggcaatccgattcggctcagcgcttctgccttgggggtgagaatttcttctcggggagtgcgatgcaagcctagacgagctttcaaccccagaatgcgctcaagagcattctgtagggtatcttcactgatgcgaccatcttttacgccctccatcatccaggcgaaatcttcgtccggatcgttgaagaacaagaacaggtcaattccggctgcaatagctgccgggaggatatctctgcgcttcatagccccggtcatcgccaccatatgtgaggcatcggtgaccaccagaccgttgaatcccagcttgccacgcagcagtccggttattaattccgggctcaacgttgcaggtaacaggtcgtcatcgctcatttccgggttgaaatgcttttgataggccggctgcataatatgccccaccataatggaaggcagaccgtcatcaatcagaccttggtacaccttgccaaaagtctgatcccactgctcgcagctataggagttcaccgaattcgacaggtgctggtcgcgttcgtccagaccatcgcccgggaagtgcttagctgcgggcataatgcccgattccataatgccccgcatataggcacgggaaagcgctaacacccgatcaggatcctcactgaaggcacggttagacagaatcgggttatgccagttacgcataatatccacaatcggggcaaagctccagttgcagccgatagctgcggcctccaccccggagaccctgcccatctcgtaggcgtactcctcgccgagttcacccggtgcggctccgattttgacctcgtaacccacataggtgccatccgtgcaggcgccgttcccacccgcctcagtgttagccgcaatcagtagaggaattttggatttggtttgcaaaatgtagttttgctcccaaacttcctccgcggtaccggggttatagcgtacggcgccaatatggtagcgattgagcacatcggtgagatattcttcagtgcgctcggctcccatatttacaaacagctgcccgactttttcttccaggctcatgccggcaattgtgtcccgcacccacttggcgtcctcatcgctgaggctataaggtttagcgcttaaatcaaccatgtttttctttcctaggattttcctctaatagggtcgcttagtcactagtagggaattgaggatcctcattagcgagtgcagttacatccacttcagcaagcggtgggatgccctccggggagattgctgctgcgaccgaggcaccatcttgcttagccttttcggccttcttggctgcgtggcgctggtgcagtgcctcggtattggccataacttgtttgcgggtcaaggggtagatgatcaggaagatcaggcctacaagcaaaaggatgatggcgggaattaacaggtagagagtataaataccctgcagagtggcctccgattggtggcctccggcttttgcaatttctgcatcgtaacccacccaggtgattgctaagcccactagccagccagccaaggcttgtccgagtttacgcgcccaagagtagatggcgtaaaccgtgccgtcatcgcgctgtccgctcttgagttcttgatagtccagcacgtcagttagtactgcccaaatcaggatattgaaggtattggggcccaactggataaagaagaggattaccacgaaaataaccgcgctcttgataccgagcatccaggttacgaagcagagagcggaagtaaagaccatggcaccaacaatgatttctttcttccccagtttcatcgccattggggtggcaatgatggagagcaagaataccggcgcaatcgaaactatctgaccggtactcatcattccagcgtcttggaagtagtccttccacaggtaggccagggtgccgctcattaagaaggtcgccagtaggcacagcaaagcgcctagcactaatgcccacagcggacggttggtcagcagggtttttaggaatccttgaccctcgccacccttagctttttcggcagcaatttcttcccgagtcttgcgctcaaaaacaatccgttcggtgaccatagagtagcaggccaagtagcagagaattccacaaatcccgcagacgatagcggcgatggccatacgggtggaatcgatcttattgtttacaaaaatcacgtggggcagcacggcggaaatcattaggaacgccaactggccacccacagaacggaatacggacagcgaggtgcggtgcttgggatcgtcagagataaccgccgccatagatccgtagggaatattaatcgaggtgtagaaaatcgaaccccagataaagtaggtgactgccatgtaggtaactctcaccgagtagctggagttcactacgaaaggcatgtacatcatggtggaggccagggttaccgggatgcacatccgcaaaatccaggggcggaaacgtcctctcttgccgggcttgagcagatccagcaaacgccccatacccacatcggtaaaggcgtccacaattcgtgctgccaggaataatgttcccacgtgagccggactgatgcccataacatcggtgtaaaacaccatgaagaacatcatttgcaacataaaggtgaagtcgtttccaaaatcaccgaacatgtagcctagcttgtcctttattccgaatggacgttttgtcggtgctggtgcggtttggggttgtgaattcgtcatcgaagttcctttgttccttttggtctcaccggggttagcagcggtgctagcgtcctctgtgagtttcccaagcgggatgccttaatccttacatgtaaatagggaacaaaatgactgttgccaaaaattgccaagagcattccggcgcactgcaggcaaaagcacgtaagtgagcgttttggcaacttttggcaacttctgtgctgggggtggcttttctgattgcattgaggttagcaggcaaagcagcctgatttgaactctagcccccaataataagcagcagtaaggagccgctaaatgttaacagttcgcgaatcatcttcccgtagtgtttttgacctagatgggatctgggactttaaaattgacaaagacaaccaaggcgtagagcagggttggtttaacgctccgctttcggaggcttctacaatgcccgtgccggcctcgtacaatgatgtggtaacggatattgaccagcgcgaccacgtcggatacctgtggtatcaacgggaagtaagggttcctcgcaaattaggaagcgaccgtctcgtgctgcgtttcggatctgccactcacaacgctattgtgtgggtagacgacacggaagttatgcgtcaccaggggggatatcttcccttcgaagcagacattacagacaatatcgctggaaaagagactttccgtttaaccgtggcggtagataaccgtctggagtggaccagcattcctccgggttacatcaccaccgactccaccggtaagcgcgtccagacctacttccacgacttctataactatgccgggattcaccgcagcgtgaagctttatacccgccccgaaacctacgttaaagacatcaccgtggtcaccgagattgaaggaaccactggcatcgtgaaatatgacgtagtgaccggtggtagcggggaagtctccgtaaacttgaagtgtgcctgtggcaaggtcgtggccagtgctgacggggcgcagggtgagctccgggtagaagatgcgcatttctgggcgccgggagacggatatctctacaccctagaggtacacgccggagaggacgtgtatccgcaaaccgtggggatccgtactgtagaggtcaaggactctcagttcttgattaacggtaagcctttctatttccgcggctatggacgtcatgaagacaacacggtgcgcggtaaagctcacgatgacgtgatgatggttcacgactttgaactgatgaagtggcagggagctaactctttccgtacctctcactatccttatgctgaagaagtcatggactatgccgaccggatgggctttgtagttattgacgagactccggcagtgggtttgaacaccgggcttggtggaggaatctttgggagtcaaggcttcaagaccttctctccggaaaccgttaacgaaaaaactcaggaaacacatcgccgggagattgaaggcctgattgctcgcgacaagaaccatccctgtgtggtgctctgggcgattgcgaatgaaccggaaactaacacgccggaatcacgggaatatttcgagcccctggctgccgcagccaaagcagctgaccccacccgtccagtgggatatgtgaacgtcatgctctccccaccagagcttgaaaaaatcaccgatttcttcgatgtgattatgctaaaccgctactacggttggtatgtcaataccggaaacttggcagatgccgaaaaagcgctgcgtgacgaggtgaaagggtggatcaaggattatccgggcaagccaattctctttaccgagtacggtccggacactatgtcgggtcaagccgacttgtatcgtcgcccctggtcgcaagaattccagattgatatgctctccatgttccaccgggtatttgacgatactccggagatcgttggcgaacagatgtggaactttgctgacttcatgaccataccgggaatcatgcgggtaggtggcaataagaagggaatgttcactcgcgaacgcgatcccaagccggctgcctatgtagttagggagcgttggttagcaaagaaaaaggaacaaggctgctaatactgcagactagagtggagtataaatagcagaaagtaacgctgaaacagttaaacaaaagaggggggcaatgccgcatcgcaagagagtcaccatttatgacatagctgcagatgtaggcgttgccccctcaactgtttctcgcgcactatctcgcccggatcgggtaagtgtagataccgcagcgcgtatctttgctgccgcagagcgtttaggttattccaaggctggtgctgcctacagtggagaggcgcatcttgctaaaaccctggtgtttgtagcggcagacttagctaatccggtgtatgccgaaatctctgccggatttcaaaagaccgccagtgaagctggatatagcaccctgattatcaacactcaggaaagcggggcattagagcacagaaccattcaaggaatcatcgctaaagttgggggagtagccttggcagcctctcggctggatgccggttctatcaagaagattgaaaaacagcgacccctggtgctgctcaatcgcttcatgaccggctataccagtgtgattccggaaactgagcggggaatgacccatgttttccgctatttaagcgatttggggcatcgcagtgttctctacatttcgggccccgaaatgtcctgggcgaatgccattcgctggcgaaccgcgactcaaatctctgcccagttcggtcttaccttgactcgcacagattacgctgttcccgagccggcatccggagccgcagctttcaatgtttggaataataatccaactaccgcggttttatcttttaacgatttgatggctgccggtttcatgcgtgaagcgcgaattaaccaggttcaaatccccgaggacgtttcggtggtcggtatcgataactcgagtttggcgtcactggttactccggaactttcttccttgacttccgcgtcactggaaattggcaagcggggtgccgagtcgctaatttggcaggtcactcaccgttctattcgagaacgtaaacttttgcggataccaattgattttattccccgtgcctctactgggccggcgaaaaatgtctgacagacggcgggtaatgccttagggtcggcgatttagttcttaaaggaatgtaccggggcggggatacgcccgccgcgggcggcaaagtttgcagaagaaaacggggacacttccataatcggggcccatcccagcaggccgccaaaattggctctatctcctacgcccttaccgggtaccgggatcactcgcaccgcagtggtttttccgttggctaccccgattgcggcctcatcagcaattaatccggtaatcgtggcggcaggagtgtcaccgggaatcgcgatcatatccaggcccactgaacaaatagcggtcatggcctccagctttgccagacctaaggaaccgcgctggactgcctgaatcatattcgcgtcctcggacacgggaataaaagacccggaaagcccgcctaccagggaacaagccatcaggccgccttttttaaccgcgtcgtttagcagtgccaaagcggccgtggtgccgggagcgcccacagtttctacgcctagctcttctaaaatggcggccaccgaatctcccaccgccggggtaggagccagcgataaatccacaatcccaaaattcacacccaagcgtttagccacggtttgtcccaccagttgccccatccgggtaattttgaaagctgatttcttaatggcttccgcgcattcttcaaaaggacgtccgcgcactccctcgagtgccctctcgattactcccggaccagaaatccccactgacaccaccgtatctggttgactcaccccatggaaggcgcccgccataaagggattatcgcctacggcgttggcaaacaccaccagttttgccgctccgataccgtcttgatccgcggtttcctgcgcggcggcaagtacctgcccacccattttggcggttgcactcatattgatgccagtgcgggtggaaccgatattgaccgaagaacatacgatatcggtactggccagcgcctgaggaatggattcaatcaacgctaaatcgctacgggtcgcgcccgcctggactagcgcggagtagccgcctacgaagtcaacccctacggctttgcctgcccgatcaagcgtctgtgcaaagggtaggggatcagcggtgcggcaagctgctgctatcagggaaatcggggtgactgagaggcgcttattgatgatcggcaccccaaactcgcctgctacttcctcggctacctccaccaaacgggaggcagcgcttagaatccgttcttcaatgcgcgcacaagctcgctcgatatcggcatcggcacaatccagcagggacagccccaaagtgacggtgcgtacgtccaggttgtcctcggcaatcatctgtatggtttccaggatttctccggtggtatccagccccattattctccctcgtggttacggtgctttacctaggtcagcggcaagccgatttagagtttatgcatggcgttgaacaacgcctcggcctgcactttaataaccaggcgttcggcttcctctactggcgccatcgctgcctgcacctgcgctaacccgatctgggtctcatcaaattccagctgcataatcatagtgaaatattcatccatcagcgtctgggacacattggtgatattcacttggttttgggccagcgcctgcgaaactgccgcgatgatcccggtgtggtcgattccggtaactgtcataattgctttcacgtgcttcagcttacgttcttttccatccttttcgcgatttcttgaccccggtttcttcacttgcgcggtctttggtaataatggctgggtgactaccactttgattgtttcaaccttcatccaggcgctggtgctatttgtagccaccaacattgaccacttggcgttactggccttgtggtttgttcacggacagaatcgtccgggaaccaccgcacgtatctgtgccggtcagtatgtgggttttggagcactcctggggatcaccctggttctcagtacgatttctggattcgtgattcctcaggaatacctgcggcttttaggattgataccactggccctgggaataaaagccgggatcggtgaaatccgcgagcgctggcattcagaggaatccgaagaggaggacgaggcagaggcacaactaaaaggaaaaaagatcagtgtgggcgcggttgccttggttactatggctaacggaggcgatgaaatcgcggcctatctgccggtttttgcactatctgcctggtggcaaatcgccctgttttgcgctgtgttcttagtgcttgctggggtgctgcttgctcttgcccgtttcatcactggacgtatggggcttgcagaggtcctggaacgttttgaagcgattattttccccagcgtacttatcctgctaggagtgctaatcctcgcggatctgctttaggtggattgactagctgcgggagatagcaaacacgagctgccgccaagaaagaagcgattaccaatagcgcgggagtagattttatccgagcgggcgcggtgggcataagaatttggaaaatgtcgctgcgttttccaaattcttgggcaggaggaaaaatctactcccgcgctcccacagttgcttttactgaaccagggtagtggctattatcttcgccgattagctttaagcgcgtctacgcagacgagtgattagcatggcgacgccccatagcgccagcgtgaaaaccatctgcaccccgatgttctcccagaactgcgaggcggaggcgccgctaaagctagccatttccgctaacgcattgttgttgtcgatgtagtagaaggtgggtagcgccttcccgatggctactactgcatcgggcattagttcccggggaataaaagccccacataggaaagcactggctaacgccaccacgttcacgatggcgctaagggcttccttgttattggtaatttttgccattaagaagcctatgcccaagacgggcagcccaaaggccgcaatattaagcgcatacagtccctgtcgtccggtgtccgcaatgccgggcagtagcagtcgcactaacagcacattgagtgccacgaggaacgctacgatcagggcgcatccggctatcaagctcagatcaatccggaagggatgggcgggggaaaccagagtacgtttacgtacgtttactacggaaaaggccgctagcaccatagtgattacataggtggcgccggccattagggtgtagctgccaaagttatacagggcggtcacgttgtggagcgttttttgatctaaatgcgaagtgagcgtgactttactatccagtttcaggctagagtttaccgctttgaccagctcgtcctcgtccgttatatattgcccatatccgctagccagccgcaggaaccggctaactaatacctcggcagaggcgctctcggagctggcgcgggatttcacgtctacggtaggtttttcgccgtgaagaattttagaagtgaagtcgctgggcaggtaaacagcgtaagaaagcgattgatagtagagggcgtcgtcaatctcgcgttcgctagtaccggtgtctgctttcttggtctgcccggtcaagtaggagttaaaagacctggttagggcagtttcattgcctcggttgataactaaaactgtaggttttgaagcggtgaaatcaccggaggagctgggggtcgtctggaaagcggtcagtcccatgaccaccatgatggtggtaaagagaataacaaaagcaatattgcgcagtaatacctgcaggaaacctttaaagactgtcatagcgctgcttccttaggacgagcagggaggcacccaggagcactgccgaaataatcagcagcaaggtgacgtcttgccaaaaaccatcgaacccggggtgatagtagaggttatagaaaccatcggtgattagtgcggtgggatttagcttatttactaggggagctttttggtctaccacgtaacgcatagttccgcccatcatgccggccagcaccgccccgagcatggtcactgcaatcaagacgccaactttcatgttttcgccgccgggaacgagcgcggaaatcgctaccccaaaggacaatccgaccagggctccgagggaagttaataggaaggttaatgcccaattggagccaaaatcgatattgaataggaagtggcacactgccactaggaggatcagccccaccaattgcagtaggtagctggaaataattccggagataatcagtttggctttactggtaggtgccaccgctactcgtctgccgattacccccaggggcggctgggcattgttcatcactgtcatggagaacagccccccgtaaagggcagccatagccagcagcgagaagaactctgccatcagcaagtccatagatttggggctgcggtcacgcaaagtaaaaccgcttttagcaagtttgtcttgaaccgaggccgccacttgggcgggatcaaaggcaggaggctggccgggctgaacattttgaaagccaggcggggagtgagcgcgaacttttgccgcaatctcgcgctcggtgagattacttatcatatcggtgcgttgagtgatttcgtcaagaatcgctttcaagatggtttgttccatcccgttagaggcgagggtcaaatgtgctttggcatccctgctgatacctgcctgcgaggttccggtaatctcgactactccggaaacttcctcgtcctccagaagcctttttccttcctctaaggtcttgaccattcgtagtttcaaaatgggttggttttcagagctgacgggggaggagtcttccttacttaaatcatcgaaagcgattttaaaggtgctatcttggtagacctgggagtttacgaccgctaccgacacggtgtcgaaggcttctttattgacaatgtcccccagcgcccctttgaacagcagacccagcaggattggaaagacgagcgtccaaaaaaccaaggtgcggttggaaagcagcagctttaggttgtaaccgatcaagtgccgcatagttagtctcgcagttctttgccggtgagctgcaaaaacacgtcatttagggttggacgttcggagtagatagactcataggataccccggtctggctcaattggctgatgagggtggaaacatggttttgtccgtgccgataaactagttggactgtacgatttctgctggtaactgactcaatttggggattgttttccagcttttctttgagctctgggggtagctccaccccttgcaaggtaactttttcttcaatatctgatagctgtttcagctggttaatggtaccttgagcgatgatttcacccttgtcaagaatgatgatgcggtcgcaaatctgttccacttcctccatatagtgggtggtgtagaccacggtcgcgccgcggtcacgcaaagtgacgatcccgtccaagatgttattgcggctttgcggatcgactgccaccgtcggctcgtctaggaaaatcagatctggttgatgggcgataccgcaagctaggttcaagcgccgcaacagccctcccgagagctgcttggggcgaaacttcaagtagtcctcgagccccaccaacttgacggccgcgtcaattttcttcgcgcgttcggctttctcagaaatatagagtccgcaaaaatactccagattttgcgccacggttagctcatcgaatacggctacatcttggaagaccacccctaggcgacgtttaatgtcaaaagcatcgggacgcatttcttcaccgaagattttcacgctcccgctgccaaaacgtagcagggacagcatgcagttgatggcggttgatttaccggagccattggggccgagcagccccaggatttcgccctggcgaacctgaaaggtcaggttattgagggcacgcaattgctggtagtccttggttagaccctctacttcgattacgttgctcactatggttctctcgttcttagagtggctatcggtgtagcaattttatcaaggctaatcccttagctaccagtaaacagggggtgttaatcaagaattaaccaaacgttacagcagttttagaaagaccttcgagatagaggaaagaagaatttttcaatcgtagttttacggggtcggttaaactggcagaaaaagcgcatgcagaagaacaggtgagcttatggggaagaaacacgtgaaaactaacgccatgcgcgccctcgaaaatgcgggtatagaagcgcaaatgacgcaggtttcttctaaaggggagtttttagatgccctcacggtagcgcaggcgctgggagtggatccgaatctggtatataaaaccctagttttagagggcggccccggagaacatttcgtggcggtagtaccagctacgcacgagttagatttgaaggctgtcgccaggtgccttgggataaagcatgtggcaatgttgcccctaaaacagttaaccccgctcactggttacttgaaaggggcctgttcgcctttgggaatgaagaaagacttcccaactgtaatcgatgaatccgcttttgggcaagaaaaaatctatgtgtctgcaggtaaacgcgggtatcagattctagttgctgctgaggatctagcgcgggttatcggggcccagcgcggggaaatctctcgcccctgaattgcgtcctccgcacaatttaaaagacttagtgcgcagtttttatttttaaaaaaatcaaggtaaagtttcgggtgtccgaaactttgataacgggcgcccgaaaataaggcgctaaaggggggagaaaagtcttgatagatgaagtagctccctcgattgcgaaaggtaaaactgcgcagatggcaaaacaagtaaccccagattctcagaacgctcccgatggcaaggcggcggcgaagaaagggctgttgccgctactaggcccggctttcgtagcggcagttgcctatgtggatcccgggaatgtggccgctaatatcaccgccggcgcccgctacggttacctactggtgtgggtattggtgctggctaacctgatggcagtggttatccaatatcaaagcgccaaattggggttagttaccgggaaatctttgccagaaatcttgggggataggcttccgaaagccaaacgtatcgctttttggatccaagcggaaatcatcgcggctgccaccgatctagccgagatcgtggggggcgcgattgccctgcaactactttttggtctgccgcttttgacagggggcttcatcgtcggttgtgtatctttggcgctgctgatttttcagaatgaacgccggcaaagacagttcgaaaccatagtaatcggcctgctggtgattattaccgtgggattcctgtcgggtctggtgataagtccgccagatcccgcaggggtgctagggggattactgccgcgcttcgcgggtaccgacaccgtgctaatcgcggcctccatgctgggggcaacggtaatgccccacgccatttacctacattcttcgctggttaaccaccggttctccaaacgggagtcccatgatgttccccacctgttgcatgtctccaaacatgacgtggtctatgcgctagtagtcgcgggcgcagtaaacattgcgttgctgctgctggcggcctccgcgttatctggaaagagtgggactgacactatcgagggggcgcacgctgccatccaaagcgccctgggtaacggcatcggaataatttttgcgattggactgctagcctccggtttagcttccacttcggtaggcgcctatgcgggttcggaaatcatgggcggactactccatattcgggtaccgctatttacccgccgcctagtcaccttgattccagcattactgatcttgtggctttaccccaaccccacctgggcgttggttatttctcaagtggcattatcctttgggattcccttggcattagtgccactggcggcttatacccgcaaacgcgaactgatgggtcgctacactgacgggctaggaatgcgttggattatgggcgtcattgcgggcttgataatcgccttgaacctgctgctagtagtgcttactttcatgggagtagatgtctagcctcctgcgcctgcaaaaagtaaagtttcgggggaaaactagctgcgtcctcgagatttattcatggtgcgctaaccccagaaatagggaaacgcccccgagaacaatatcgctctcgagggcgcatccgggcaaagcccaaaggttagggtttaccgattttagtcctgtttgggacgtagccagagggcgcccaagggcggtacccgcagctctactgagtaggggcgaccattccattccatggcttcggcgctaacctgtcccaggttggtgactccggagccaccatacttggcgtcatcggtgttgagaatctcttcccattcaccgccctcaggtagacccacccggtatccctcgtggggattaccggcaaagttacagatacaaaccatcttgtgctcttcaccgtgatcatcgcggtacttacgtacataagaaatcacgttgtgttcggaatcgttagactcgatccactcaaacccggtatggtcgtcatcccaaagtgccggttccgtggtgtaaatatggttcatatcgcgtactgcggactgtactccctggttacgggcatcatctagtaagaaccaatctagcgagcgatccgcatcccattcggcgccctgcgcgaactcgccacccatgaacaggagctgcttgcctggatgtgaccattggtaagcatagaggcagcgcactcccgccaattgtcgccagtagtcaccgggctgtttcgccaaaatcgatcctttgccgtagacgacctcgtcatgagatagcggcaagatatagtgttctgagaaggcgtacaccagtgagaatgtaagttcgccgtggtgccaggaacggttgaccggatcttcacgcaggtaacgcaaagtgtcgttcatccagcccatattccacttcaaaccaaatcccagtcctccagcatcggtaggagcagttacccctggccacgccgtggactcttcagcaatcatgcagataccggggtgcaggcggtaacaggtggcgttggcttcttgcaagaaagaaatcgcttctaggttctcgcgcccgccgtactggttaggatgccactggccttcctcacgggagtaatccaggtagagcatggaggctaccgcatcgacccgcaaaccatcaatatggaactcttccaaccagtagagggcgttggccaccaggaagttacgcacctcattgcgcccaaagttgaagattagggtaccccaatcgggttgttccccgcgggtgggatccgggtgttcatagagttttgtgccgtcaaagtctgccagtgcaaactggtctttggggaagtgcccgggaacccagtcgaggattaccccgattcctgcctggtgtagcttgtctaccaggtagcggaaatcatctggagttccatagcgggcagaaggcgcatagtagccactttgctggtagccccaggagccgtagaagggatgttcggaaaccggcatcatttctacgtgggtaaagcccatatctttcacgtaggcaactagatcctcggccaaatcccggtagtgggtgtcataagaccaagacccgatatgcatctcatagaccgacatgggggagttgtgaggatcagtttgtgcccgcttctccatccattcctgatcttcccattcgtggtgttcgtcggtaactaccgaggcagtcaacgggggaatctcgcaggcgcgcgccatggggtcggccttttgccgccagtttccgtctggccctaaaatctcgaatttatagcgggctccgatttcgacgttggggacaaacaactcccagatcccggaagatcccagggaacgcatggaggcagtttcgccttcccaatagttgaagtcgccgaccacccgcacagcttgggcattgggtgcccacaccgcaaaggatgcgcctttggtttgtcccatttcggtgtcgtaggtgcgcagatgcgctcccagaacttcccaaagtttttcgtggcgcccttcgccaatcaaataaaggtcaaactcgcccaccgtaggcaggtaacggtagccatcatctagctccgtggtttcctcaccgtaggtggtgcgcacccggtaatcagggatttcagtgccgtcaaggactgccacccaaatgccatcttgttcatgggttgccgggaaagtgcccttgggggtgacaatctcgactgcgtccgccaaatgggcgacggtacggatagttacggaatcgtcgccaacgtgggtgccgagcaccgaatgggggtcaaaataccgcccatgggcaacgttagcaaggacttctggatctacagctacaggttttgcactcatgtatctagcgtgtcacgaatcgcccaaaaattctttggaatgccgtcccgatttccaaatttttccgccccgagttccaagaccgtgcacagcctaaagctacgcgcggggaatagtgtccgcgcacaggggcggattttgcctcgcgccccgaaatccggaatttttccgccccccgagttccgagaacgtgcgcgctttaaagctacgcgcgggaaatagatttttcctcccgcccaagaaattcggaaaacgtagcggcgttttccgaattcttatgcccaccgcacccactcggacaaaatctatcccccgcgctcgggtgaggagtcaccccactaggggcgcggccttcgcagcgcacaggggcgtgagggaaaaattgttcttgcatgctcagtgcgtatctcccaggattctcgtaccagcgctgttgctagcacggggagagaagttttatccgagcaggctaggcgggcgtaaaactcgaaaatgcccaggggtattttcgagtttttgggcgggaggaaaaacttctctcgccgtgcatagggcgggaggaaaaatctatcccccgcgcgtaccgattatccgtacacacaggcggatattacccggtggggttaccaatcgatgctgaagtattgcacctcttggaactcccgaatcccttcgcgggcaccctcgcggccgataccggattgtttgactccgccaaagggggcggcgggatcggaaaccaggccgcggttcactcctaccatgccggcctcgatcttttccgctagatgtagcgcccagttcagatcgccgtaaacataggaggccagacccatttcggtgccgtttaccatttcgaggagttcgtcctcgcaagaatattccttgatgggggcaagggggccgaagatttcgttttgcagtaggggagagtcggcgcgcggcacctcgataactgtgggagccacgaaatatccggctaaatcactgggtagcggcgctttagccagcacctttgccccttgctccagggctgcttctaaaagctggtttatccccttcatggctttttcgttaaccacggggccgatttcggtttccggatccagtcctgcccctactctcaaggccgctactcgttggcatagcttttgtgtaaactcttctttaatatctttgtgcaggtagatgcggttagcggcggtgcaggcttgaccgccgttacggaacttagcgatcattagtccttcaatagcggcgtctacatcggcggtggcaccgactacgaaggcggcgttacctcctagttccatggcggtatttactacccggggagctgcgagacccagcagggagcggccaactggggtagagccggtgaaagatactagccgcacccggggatcggctagccaggtctcagaaatatcggcagagtgacgggagggcactagattgaccactcccgctggcactccggcctctttcaggattcgcattactcccagggcggttaagggagtttcggaggccggttttagcactaccgcatttccggcagcgagggcgggcgcgatttttcgggtggccatagcggcggggaaattccagggggtgatcagcgcacataccccgaccgggcgggcggtaaccagggtgcgtgagcctcctgcaggcgggattgcataatccccgtcagagcggactgcttcttcggagaaccagcggaagaattcggcggcgtaggaggcttcgcccagggaatccccataggctttgccattttcccagctcatcaagttggcgagttccttgctggaggctatcatcagttcccaggcgcggcgcaaaatctcgccgcgttcgcgcggagagcgcgctgcccaccccggttgggcgctggccgcagcatcgagtgccgcgcgtgcatcggcggcggtgcccgagctaacttcggtaatcggggtggtggtggccggatctatcaccgggaaagtttccccgctagcagctgctctgccggagttattaatccaaatggctttcgccggttctaaattttctacgtactgtttcaatgcttggctgtccataactgcatcacttcgttttaaataccgctttttctgcgccttcgcgctaagtctatatctctagcgtcagcggtgacagaaaagtatctcccccgagcgtctggtccgctcgggggagaaaagtgtcacctcaacgggcagattatctgcctaggcgtcgatcacgggtagagaccgcgccgtttgtgagcctgcaagacgcgctccaccgccaatacggtagcagcgacgcgcaaggtcacgcccttttcttcggcgtaagcctctacatctttccaggctgcggtgattcgctcttcctcttccttttgtacccgctctagcggccagaagaagttgtcgcgtccttgtacccattcgtaataggagacgatcacgccaccggagttggccagaatgtcgggaacaatcattactcccttttcgttcaaaatcttgtcggcggcggaatcggtggggccgttcgcgccttccacaatgatcttggctttcacatcgggagcattgtccttggtgagcacgccttcaatcgcggcgggcaccactacgtctacgtcgagcagcagcagttcggcggcatcgagcggttcagcgccggggaagcctaccactttgcctttttcgtccacgtattcgcctagcgccttggtgtcgataccgtcggcattgtagatggcaccgaagatatcggaaatggcgactactttgccgccgcgacgctgcgcgatttccgcggctccgcgccctactttaccgaaaccttgaactgccagggtggcctcttcaaacttgatgccctttttctccagggcagcttccaccatgattactacgcccagggaggtggcttccgcgcgacctagagagccgcccagggaaaccggtttaccggtacaaatgccggggactgtatagccttggaactgcgaataggtgtccatgatccaggccatggtctgttcgttagttcccacatcgggggcgggcacgtccttttccgggccgataatcggcagaatctcggaaatgtagcgacgagttacccgctctagttcagcctgggaatacttgctggggtcaatagtcaccccacctttagctccgccgtagggcagattcactagggcgcatttccaggtcatccacatcgacagggcgcggacttcgtcaatatcgacgtgctcgttgtaacggatgccgcctttggcaggcccgcgcgtcaagttgtgttgtactcggtatccgtgcagcacctcgtgggtgccgtcatcgcgacgaatcggaatcgaaacgctcatttcgcgccgaggcgaagcgagcatatcgtagtccccttcggaaaaacccaggattttctgggcttctcgcagctgactcttcgcgtcctcatagggattcggtttgtaatcctcggacatatattttgatctcctttaaggttttaaaatagggtctgaccttcgctttttcctggttagcatgaagcgccagcggattttgctccgcaggctcaggcggtcagcgccccatctacctccgttttcgggcggcggtagcttcagtctatccgggacttaagtcggggtaaatatgcaatatgcataaaatctagaactggaatgtgcataatgtacatatgattactgtgcaggcactcctggggcggccgcatctacatatccaatccctgtggtgccctaaccccttggcgaaactgcgctgggtggcgacctcggaacaaataaatcccgctgcttttttagagggaaacgagctgttgctgaccacttccgcggggaatccggagggtgaagcaggttggctggagtatgctcagcgcctggtggccggggggattactaccctgggattcggtctggggttcagtcatgacaaggtacctccgcttttagtgcaagcagcccgggaaagcggtcttaacctgattgaggtggccgccgaccagtcttttgtggcgctttctcaagaagtggcgcggatgatcgagaccgaagccacctcgggcaaatataaactgtcggctttgcaacagcggctgattcgcgcgtccgcgcagccgcgaggagcagaaataatcaccgcagagttggcgcgggggattggcgcgcgggtgatcatcagggataaggcgggcaggacgatagcgcagtcagtagcccctacggtaactgtcgatttagaggacttagcggcagaggcttgggagggattttccgccaatacggcgcagctttcctttgaaaccgcggaaggatactgtcttttcactccgattaacgctcttgggaaggaaaccgcctggttgcaagcctgttggagcgtttttccgcagccttggcagcagcaggcgctctcccaggcttccctgttaatcgcttcggccttggctaactctcggttcgttgcctcctatcaggggcgcctgttgcagcgggcatttgaattgttgctttctggtgagctgggggcggcgcagattctaaccgagatggcgtttcctctctctcgcgccttaagcgggcggtatgtgccggtagtagttaccggggaagagggggatctgcgggtcttgactgctcgggtggagcgggcagtgacaaaaagtatgcctccaccgctgtggcgttttcacgcctcccatctggagatggcgattccggtagcggcgttgccgctgactttgtccaacttttcccggaaagagttttctgctttgcgagcaggcgtggggcaggagtacccgatatctcgttttagtacgggtctttctggggcgcggcaggcgctgcggcacaccggaaatacccagcaagtcgcccggtgggaagagatttcccgttccgggctaatgcaggtgataggtagggaaaccgcggctgctttttctgggcagtttctgcgacctttgcgcggagaaacggatctgctggcgctgctggaacagtatgtcgccactaaaggtaaccggcagcagatggcgcaaaacctgggactgcatcgtaacaccgtggcgacgcggctggaaaaactgcagaacaagttagggattaacctggcagaagccggtgcccaagcctccgcttgggtagccctccaaggacgcgattcctagtggtcttggcgcagtttgcgagccgcgagcagtccggcaccggcgagggccaagagcgcggagatcaaagccagggtagctccgttcgcaccggtcacccgcaaagaagagggcgccggtcccgccgcagaactagaccccgtagaagagctaccggtaatataagcaccggaaggtgcttcggtggctccgccagtttggccagctgacggctgcgtagtagctccaccgttgttacccgggttgggcttagtgctgggctcagtgctgggcgtggtcggctcggtagtcggattatcagtgggctctgtagtcggaggtactaccggggcagccgggttaacgaatggggtcgccgcggcttgcgaccatttgccgtccgctcccttattgaaggacagcgtttgtcgcgctgccagtttcagaccttcagcggtagttagctgctttagctgatacttcaaggacacgtcgctgacctttacccgataggcaccggtagcagcatctaggtcagtgggtaccccgaaggtggtagtgccactgacaaaatccgtgaccttaaaggcggccgcggtattggggttatcatctttgcccaggggagtgatctggaaagaagtcccggctactgccttacctttagaatcaactaccttccaggtgagttccccgccaaccggtcgtgtcgggttatcggtagccttcttggtattgctaatcactagcgtcccatcagtgaggtcaaccccagtatcgtctatcgaaacctgggctttcccattttcaaaactgatgctgtaggttcgagcatctttttcataaccttccggagcggcggtctgctgcaacttataggtcttagcctgattcaaggtggcctggaaagaagcatctgccgcattctcagtgatattgaccttttctgcgcaattagtcagcgagaagctgccgccggataaaggcttcgaatctttatctaccagtttccaagtgaactgcgcggtcttaatcaccggggtgttttcaaacttgaggccgcttcctactacgttttggaggtagcgtccatcattttgcagcttgaaagtgacctcctgggcgccggtcttgggagcaaaatcagcgccagcggttagctgctccacctggtacttgcgggagccatccgggactattacccggtactgtccctcgcccttatttagatccacactgaccgtggtagtggcgtcagatacggtgaaagacttggtttcatctaaggtctttccatctgctttaaacgcagtcaccttaaaagaagttcccggtacatactgggaggaatccgcggaagaaacaacttcccaacgaatctctgccttggtgggtagcttaaggttcttaatgaccagcccctcagctgccaaaggcttcccgtttatctgcggctggtaagtgtcaccgttggcaacgaaagtgagcttatagctagcggtatcggctttgtaaccagcgggagcggcactttccgtcaaagtgtaggtcttcttgggatccagattcgaagcgctgtaaaccccgggctcggctgcatcctgggaggtaatctggagcggagaatctccgccactgagagtaaaggttgctccattcagcttgttaccggcggtgtcagttagcttccaagagaacgaggtagtggccggaggcttaggtagcgccacgttactgaaggtaacgtcgctagtttccttaccggcaaccaccgctgcccaaaggccgttggccttatctttttctacgaaactaatttcataggaagtgacgtccccaaacttgtagccttcaggggctgcagtctgggtgagggtgcacgctcccttagtgggatctaaagaaacgctataggtgcccgaggccgcgccggaagcaggaaccggtacctcttgggaaccacaaaccagcttgaaagtgcctccgggcaacagatgcttatctacatcttgcagtttccagttgaaagctaccggctggggaggcagcggggtcttggcattttgcaccacaaaagcatcgcctgataccgcctggccgtctactttcacctgatacccctgagaggtcttttcgaaagtaacggtatgggtggtttgctccggcaggtcatagcccgagggagcagcagtttgagtaagtacgtagctctttgccggatccaggtcactgacggtgaaagtaccggaggaagaatccgggacggtaactgccgcgccgcccttttcggtcaaagtgaattttccgccacttaatgcctgacctttagtatcttgtaactgccaggtgaaagccactttttctggctgcggatccgggggagtgaccgtatcttcgcacttagtcaccgctttcaccacggtgtcggcactcagctttgtctgagccagctcggcctcaccggtcgcggtgccgttaagctcccaatgatccaccgcgcaggtcttatccggaaccgcaggtagggttactgctggtagcgctccgatagcggtattcgggggcaagtagcgagtagaggtataagcctgggggagggatcctccctcgccagctacctggtactttaaggaatatcccggcgcccagagcaatccgtcctgggaataaatctgaccgttaaccgggaaaataaaggcatccgccgcgttcttatcgccgtgataggcaaacaggctgggggttacccccgattgcaggtagtagtttccggtctttggtactgagaatgccagattattgtaaagggtgctggtcagtgcggaagaaagcacggcttcgccttcggtattaaccagcgagaatggcactgactgtttattctgggtgagtttatctaccgcagtggtcagtcccaaggtttggggattgccggagccgtctgcctggccatcggcaaagcgcagattcagaacctgccccttgcctccggtggtatcgaggggcatattctgcccttgagctagggcgtatttaccgcgctcagcgctgccatcagtgcggggagaaccatcaggcgaggtgacgtgaatcttagcgcccgcgtccaagttagcggtaacggtgttacccccgcccctgctctggaaaccaaggcctacgcccgagctggcttgcccgccaatcaaatcaagattggggctgcccgaaagagtgattttaactggaactttactctggtatccggagccaattgctgccccgaaaccgtatcctagtttttgagtttttaacgttactggctgcactacggcctgcagagtgggagaaccagaaatcgtgacctggaaaggttcggatacgtaagtgtcgatgaaaccggcactgccgattactgctccgtcgcggcgcccaaacactttcgcagtcacattcgcctgatcggtgatgctgacctgcccggaacggtttgaagctgagccaatagccccgtttaccgccgatccctctttgctgggattcgtttcgctacttggagaggttttgtcagtttctgcatttacccgcgcgttcccagaaataaccacctggttttgttctgccccgcggattgtgtcctcattcaaacgtgagtttccagtaaagatttgttctgaggggaggccaccggctccaatagcgggggattcacgtaccacccccagcgcctctacctgggcattatccgagatggtgaccttagaggttccggaggcgtagcccccgccaatcgccgcaccgcgaccattagaataggcggttacctgcgcttttccggagattttcacgctcagattcgcgctgtcagggccagatccgatggcggcgatatccccggccttattaagggtggaatcagcggttcctacgttcacttttccgccgctaatcgctacttcgcagcccggcgccagtggccagtctagattggcaaaattttcattccagttaccgaccccgcggcaaccgatattcatcgcgctatttccggtgtcagtagtagccgggctgacctgcactagaccgccggaaatattgacccgcgcatagggttgggtgaaattagcggtgaccttaccttcggaatcttgcagcggagtagtgaaactggctgctcccagggcggtgtggttgccgctggcattgatttgccccccgctaacgttgatgtttaccgccgcgttttgctgtgcccattcagccccggcagaagcaggcagctgcacagcgccgcgaccagtaccgatgaaagccccgccataggtgccgctcccaacctttgacaggttaatggtgccgcccttgacgttaatagtgcccccggcgctccaaggggtttcatcatagttgtttagccagctgggattagtattcgggttgacttcgtaaaaggcaccaccggagccaatcagggccgcggtttgagaagatcccttcaggttcaggttgccccccgcaatgttgatagtgccgaaagccgaaaagtgctgggtgccgataagagctgcttgggagcggggagaatccgggttagacagaatcaaacttccggacccatcctggccaatatttagggtggttcccgcctttacctgcactaagggtagcggaacagcattgtctttagaagcattttctgaggaggcactctggcgggtaaaggtgttttttccggtgaaagccaaacggttatttccgttgttgtcaccagcggtcaccatcgcctgctctgggaaatcggagttgtcgatatttaggttatttagcgtcagagtatgtccttctctgacgtcgaaagatagccccttaaaagtcttattttccgcgccagtcacggtcacgttgtcacccactgtaagggtgcgtcccgaggcattttcgggcaaagcggaatcactgaggtcaatgtcctgggtgatgacggtgccgatctggttccaggatttgatgaccttgccgttggcagcgttagcaacgcccaccgctaaagccggtccgatcagggcaatcatgtatccgattagggagagagtgaggacgagtgccgttgggcgcttcgcgaagggattgcgcatgaatactcctgctacttcctcgaggttaaaaacattacaattctgtaacaaccctaccagaaattagggcggaaacgctagtgtgtccaccctaaaaaatcagctatttatgctggttaatgcgactgtggcagaagtagcattaacgcttctaaggggatggttacccagtcggggcgttgctccgcttcatagcgcacttcatagagggctttttccacttcaaacgcccgtaaaaccaccagggcgggggcggggcgttgctcctcgccaaagtagccttccaggaaagctaaccgcgcccgattaagccaatcgccatccgcgccgccttctacgcgggcataatcaaaagaacgtagcattccggcgacatcccgctccacctggtcgggggcagtacgttcttccagaggacgcaacggctcgccctcgaaatcaatcacgtaccaactgtcggaactgtatagacactgccccaagtgataatccccgtgtacccgctgggtagggggaagtccccccataccggttaaggcctgggcgaggcgatcgacttcttccccgatttggggatgctcccgcagctggggataggtcgcctccgcctgctgatactggtggcgcaagcgagtagccatcatagttccggaggcaggatcttctccggggccaaaggcttctagcaggtggcgatgcatatctgcagtggtctggcccaattgacgagccagcaccgtgggatcttcgccgctactcgccaaggaacacatcaagcggaaaccatcctgggcttcatcgaggcgcaccgcagcacaagcagtggtgacctgttggggctggccgtcctgatcccacaggctcagctgagagtatccgcgtggttgcggaacgccttgccaaccgctgcgagccaatgccagcggtacggtcacctccggattagcgccggcaaccagcacccggaaaaacttaataatcgtaggatatttcccgcccaaaagcaccgaagaattggattgctcaccgcttaaaactttgctgtctaaactcgctgctagcaggttagatattaggtcttcggattctggaagtagcggcaaggtgccggcctggtaagtggagcgaatccaatgctgaacaaaggcgggacaatagggggcatctatcaaatagcccgggttttcaggcgagccgtcggtgcgtccgataatccccgcaccgctccaatccgcaaatagcgccaagggtaggtgataccaaacgccctgcgcctccaaaatcaacagccggaaacgaggatcatcgagttcccgataatccagaactcgcacctcagagcgctccaagtaggaaggaaaccagcgtcgctgggtgatatagtcccagacggtgtcgatgatagcgtctctgccaggccatttaagctggctattaagggtttcagcggtcatcttcatgctcctttagcgccgagaaatctaaggcagggtaggcgtcggccgctcccgtgctctcggtatctgactgcgtaggggataccggggtagcgttgggcacaatcaccggcaaagaagtagtggtggcaggaggttccgcagtttcttcccgggcctgttctgcctgctcagcagggaatagttctaaccaataaaaaccgtgacggttcatagtgacggtgacagtttcatcggcacccaccgtggggaaccatgccccgttgaaagcttcgcgcagacaccaagttgccatgcccggcaaagatagccgcgccgccactgcgccctcacccaagttatatacacaaagcaccgtggagttttggtcccggcggatgaacgccagcaccgagtcttgatccgagcctacctgcgataatgagccttgcccgaaacaggtgaggcggcggcgcaggtggatagcgctccgcagccaatgcagcagggaagtggggcgtcccagagattcttgcacattgatggtgcgattatcccaaccaggagcgtcaatcaagggcactaggaaagtttccgggtcggcagcagaaaaaccagcgctcgcggaagtatcccactgcatcggggtgcgcactccgaaacggtcaggcagccaaatattgtcacccattccgatttcgtctccgtaatagaggaagggggagcccggcatagaaagtaacagggcgtgggcgagctctattttgcggcgcgaaccccccaaaagcggtgccagacggcggcggatccccacatttgcccgcattcgtgactcgggtgcataccaggaatacatgtcctcacgttcctggtcagtcaccatttccaaggtgagctcatcatggttccgcaagaaggtaccccattgggcacctgccggcagttccggcagctccgccaggatttgccgtagccccttcgaagatccggtgcgcaaagccgcaaaaagttttggcatcagggggaagtggaaacagatgtggcactccgggtcggtttcgttgccgaaatagtcaatcacatccaagggaggctgattggcttcggccaccattaaggttcccgggaactccgcgtccaccattttgcgcagctcgctcacaaaccagtgggttttcggaaggttttcgcagttggtgccgttttcttcaaagagataggggatcgcgtctagacggaaaccatctaccccggtgcgacaccaatagcgcaccacgttcatcactgccgcctgcacctggggattctcaaagttcaaatccggttggtgcgagaagaaacgatgccaatagtattggccgcgtacctcatcgaaagtccaattggaggtttcggtgtcgatgaaaataatccgcgcgtcccgatactcttggtcactgtcacgccaaacgtagaaatccccgtattcgccctccggatctttgcgagaagcctcgaaccaaggatgctggtcggaagtgtggttaactacgatatcgaccaggatccggatcccgcgttcgtgggcggcctccaccagggcggtgaagtcttccatagaaccgaaagccgggtttacatcggtgtaggcgctaatgtcgtagccaccgtcgcgcattggtgaagggtaaaagggtggtagccacaggcagtccacccctagccatgccaggtaatccagacgtgaaattaatccttgaaaatccccaatgccatccccgttggaatctgaaaacgcctggattagcacctcgtagaaaacggcgctgcgataccagttgggagactccgcgggggaagtaaccgcctgggaagtgggaggtggcagcaatagtttgctcagactctcgctttcctcagttcggttttggctcaccaggactccttaaattatttttctaaacctctaggcagattccaccgacataatatgggcaggtcgttcataggggttgagctcgaagtagttagctgacccccaatcatagactttcccatctagctcatcgcgtaccttaaagcaggacgaggaagaaccactgatcttcagagccgacaagtccaggtggatggcaccaatcgcagtttcgtgaggatctagattcactaccacgattacggtgtcagcttccccggtgggggattcccaagcatccaagtgacgcgagaagcaaaccactcccggatgggtagtttcatgaatcttcaggttacgcagacgctgcaaggccgggtgacggcggcgaatcccgttcaaagtggtcagcaaagccatcatttcttgggcggttttcccggagtaatcacgtggcttatactcgtatttctcgttatcgatctgctcttcaaaaccggggcgctgcacattttctaccagttcatagccgttatagatgccccagagaggagaaccggtagccgctaaaactgcccgcattttgaacgctcgcttcccgccatcaaccatgatttggatcaaaatatcgtgggtagtcggccagaatgaaggccgcatataggggcaggactcccaagaaacctcttggaagtattcttcaatctctttacgagtattgcgccaagcgaaataggtgtaggactggtggaatcctacctgtgccagggtgcgcatcatcgccgggcgggtaaaggcctcggataagaacagtacctcgggatgcttctggtggaactccgccaaaatttcttgccagaaccgcactggcttggtgtggggattatccacccggaacatagttactccgtggtcaatccacttttgaatcacgtctcgcaccgcgttatagaggccgcggtagtcctgatcgaaaatcaggggataaatatcttgatacttcttgggaggattctccgcgtaggcgatcgtgccgtctgggcgatgcttgaaccattcgggatgttcctttacccaggggtgatcgggagagcattgcagcgccaaatccagcgctacctccagccctagtcccttggccttcttaacgaagtagtcaaagtcatcaaaattgcctagatcagggtgaatagcgtcgtgaccgccatcggggctgccaataccgtaaggagagccgggatcatccggggttgcctccaaagtgttattacgtcctttacggaaagtagttccaatcggatgaatcggagtcaaataagcgacatcaaagcccatagaggcaatccggggcaagtcagaggctgcagtccgcagggttccggaatgccaatgtccttccttatcttgataggcgccaatagagcgggggaaaatctcgtaccaggaaccatagagtgcctgttcccggtcaactcgcaggggataggtgcgggaagattccagcaggtcgcgcagggggtgagtccggaaaattccccggattgaggaatgcagccccaccgagagccgctcttgggcggggcgcttcttattgcgcatcgccttggcggcttcgcgcaggcgtttggcgcgttcggcatccggtgctttttgagttggattattgatggcttctccggcggccgcacgctcaaaaagtcgcgctcccagctcgaactccatctccacgtcttggtcagcttgaatcttaatagaggcttctttagtccaggtcttataggggtcgcagaaggtgtctactctaaagctccaatccccgacactggtgggtttaatccaggcctccaggcgatccaaacctggggcgacatcgtacatccgcgaccgcatggtttctttgccctgcgggtcaatcagcaccacttccgcccctaaagcgtcgtgaccttcgcggaacacggtggcgcgtaccgggaacgactcattttcgaccgctttcgctggccagagcccatcctcgataaccggttctaactcggtgaccggaatccgggctaggcgagcctcgggggaaatcaggtttagaggcttagaggaatccgctttatgggaagtggatttgggagccttaggggcagcagtctttgcccgagtagtctttttagcaggcgcgctggtggcatctttagctttgttagctgcagccgcggcggttttggctttaggagtcgctgccgctttgggtgcggctgtggctttggtgctgacgtgcttccccttcgaactagcagcggccggactggaagttttagctttctgaccagctgcgttagtagttgagcgagttttgcgggaacgaggtgtatcgccggccatagtgactccttaatagacgtgcttattcccctccagcctaacaaagaggtatcgcgtctcgcgtcctttccgctcccagctagcgctaaaaaagggagggcaaataagaaacagctatccagaaatgcagaaaatactttaaccgtcagtagccgaggcggggccatctaaagaaatcttgggacccagataggtgggcttttgtccggtagtcacccaggcaacatctttggtgcgtgccagatactcgcggaggttacgctcggtttgccccggataggcgttaccggcagcacctactccccaaacttcgattccgcggctttgacaatcgtagagggcgcgcggcaaatgataaggctgggttacaactatcgcgcgttgcaccgaaaaaatcgcttctgcacggtaagccgactcataggtagaaaaaccagcgtgatcagcatagattacctgggccgagatgccatggttaatcaaccaagttttcatagccttgatttcgtcgtactgtacctgcccgtgatcgccagtaatcaggattatctttgctgctcccgcctgatacagattcaaagcggtttgcaggcggtgagccagcatcggcgagggagagccattcggatttacccccgcccctaaaaccatgattacctgggcgttcttatctttagcttcggagagagaaataatctcatccttggtgcgctgccatacgtaaagattggttcccgccacgataattacggcgataaccaccagggtaatcactagccgaatcaggcctctcaaagcacgcatgaggctagtaaaccatgttcatcgcctggcgaacctccgccagggtctggtcagcgacttcattagcgcgttgatttccgcgcgccaaaacctgccacaaatagtccgggtcagccaacagttcggcgcgccgcgccctaatcggagacaaagccgcatccaaagcctccgtgagcacctgctttagttttccagcaccctgatccccgatttcttcggcaatagcgcgcggatcctgtccgctagccaggccggccagccgcaaaagattcgaaacctccgggcggttctccgggtcataagtaatctgccgttcggcatcagtcttggcgcgtttaattagcttcgcagtttcatcactgctcatccccaactcgaccgcgttccctcgcgacttcgacattttttctccatccaaccccaaaatcagggcgccatcacccgaaagcagcccctccgggcgggggaaaacccgatgtttcagggaagacttccgccggtaaacccgctcgaaacggtccgaaatcacccgcgcctgctccaagtgggggagttgatccttacccaccggcaccaggttcgctttgcagaacaaaatatcggctgcctgatgcaccgggtaagtcagcaacaaccccgacataggccgctctgaagccaccagctccgccttcaccgtcgggttgcgatgcaactccgcctcagtaactagcgacaaaaacggcaacattaactggttagctgccggcaccgatgagtgcgtgaaaatcgtggttttttccggatccagaccgcaagcaatatagtcagccagcatattgaggacgcgctcgcggatcgggccggtaccctcgcggtcagtgattacctggtagtcagcaatcagaatccaggtttccaccccgcgcttttggatctctacccgattcttgatcgtcccaaaataatgccccaaatggagggcgccagtcgggcgatccccggagagtacccggaacttggaaggatccttatcgatcgcttcctctatctgtttcgatacccgctctgctcgctgcaaagaagccgcatcggttgaattttctagtttctcgccgctatcgctcatggttcccagtctacggtgccggtgatattcccggaaaaccgcgtgcaatcctgcagtttttcttgtttacctaagcggattaatctgatgcctgttgcgggtctggctcggtaaaagcactccggggaccccgtgacctgctacgcaggtcaagcccctctcgtatcttttaccggccgcgacccgaaaaatctttatcctattagccgcatatgtataagaaatagaagctggaacgattgcttgcacgcgggctttcgggaatgaagttaaataacagggtgtgtcacctggtagttgtttgtgcagttgattttctgttgccttggcaatcggatggtagttacgcgcgggtaaaagtttttcctcctgcccaagcttgattatcaggcaacctgctgcgggtctggctcggtaaaagcactccggggaccccatgacctgctgcgcaggtcaagcccctctcgtatcttttaccggccgcgacccgaatcttgcagttactttgcgggggtgaagtttaggagttggtcgcggtaatactcgtactgtttacgccgagcttcgatctctgcaggtaaaccagaagaaagatcgtttaccaaagcatcaaacttgtccagaatcgccacaatgcgttcctgttccggaatagggggaatcggaaatttgtagtccataactgcattcttatcaccgcgtggcattttggcgccccgtgcgaaccgattgttatattcaaaaaaattctcggaagctaaaacatggtacagaaattttgaaattatttcttttcgcttttcacttttaattgtgattactaaaacgtcgccactggcgcccccatttaaatcgctgtgccatatttttcgtaaatacggacgaatattacctataagaatgtcaccaggttgaaatctagacaatttagctgtgtttggtgcgtagtctgacaattttttgccgcgtttattggctatcaagttatcaacaccgacatacgaactattatcagttaaagaggatggaatctttttcgccgaataacttgctatatcttttagaaaaaccaatcgaactgcgttccctagacgattggtgagattctccaagctgagaagcgagtcgcggtagtattcgtactgcttgcgacgagcttctagctccgcttctagctccgcttctagctccgcatctagcttggtgaaagaatctagaatccgtacgatttcgtcttgcacttccagcggcggcaccggaatcataagagaatcggtatctcctactgacaactggggaattttaacggaagtagcacgagcgtgattttgtaaactctcagttaatgttttgagaaagtaataaagaaatttggtggagattagggaactatcgcaggtataagaccagagttcagatttatgtgcgcacggaatattgcaatattcaaaatctatgtaccctctggacttaacgattatgcactcttttttcagtgtcctgttttcaggaaccagttttggattgaaataagccttagtattaccagctccaaatacgagtattccctcgttgttggatttttgttcgttaataagtttcgcagttacagaaaaccctttgtttctctttgcgattgaatccaaggatctccactcaacggcgctgttagtcacataaaactcaagtaaatcgtctattcggctcataaggttacctcggtgtttggggtgctgctgacgcttttggggcttggtgtttgcgctgttgtagcttgcaaggtaaacctcccgataatcgcagcctcgccctctatcgtacaaagtaactaaccagcgagcgataaacttgccgtcactgatctacttcactgacagacatttacaggtttgcgcgggagagagattttatccgagtgggtgcggtgggcataagaatttggaaaacgccgctacgttttccgaattcttgggcgggaggaaaaatctctcccccgcgcacatagtagattcctcggtaaagctgttccgccaggtacgggggctagttgaagcggtctttattgacccaatcgtagagccattgcaggttaatcaagggatcgttttgcgcgtcaatcaccggctgtactgtgcgataaatgtctttcttcaccgccagaatatccacgtttttggaaactggttcataggtatcgcaatctcgcacttccacaaatttaaattttttatcgaaaacgtaaattaaagaatcgccgtcgaaatattcgtattcccgagatgcccaaaagccgaaggaaggtgcctctcgtttcgcgtagttgtagttgtagatagttctgttattgtcgcggtcgtacctcattcccttaacatctggggcgtagatccagtcaaaattaagtgccacttccatgaggacgggttctgtttgtttattgtgcggggtgtactgggcatagtagacggattcggatttgaggttggtgaatgcgtatccgaatgccaacacaaaaacgataaaggcgatgaaaatcgtaaggataactttctttaacacgagtattctccttacttgcaaagccttttaagtttttccgcagaccacgcgtcactggttaagagagtgggtttggctactctccggtggagtcagccaagaaaagtttgatagacaaaggctctaggaggatatcgtcaccggcgaggttcagcgggagcgcttcctcctcatctccttcgataaccgcagagtcccaaatctcgtggtaggcggttcctcgtcccggagctagccgcacgtgtttcggagacagcgtcccgttgaacaccgccagtaaatcctgatccatgtagggacgccccgaacgcagcatctggaaaacccggctggcgggatcgtgccatgcccgatcgcccattagcagtcctacctggttataccaggaaacatcggggagggtatctcccggatgccgctggccgctcaagtattttgcgggtcggaaaaccgggtgttcacgccgcaaagcaatcagcttgcgcaccgcggtatacatgtctttttgccaatccaccagttcccagttcacccaggtagtttcattgtcttggcagtaggcgttattgttgccgccttgcgtgcgcccaaactcatcacccgccaaaatcatcggggtgccggaagaaataaacatggtggtgaacatgttaagtaccgaacgcacccgggcagaaagtagttctgccagcggagaatccccagctatgcctgattccatctcgctgccgagttggaaggcacgcccctcgctaccatgattccaagacaggttatggggggagccgtcccggttattctccaggttttcctcgttgtgtttatggtcgtaactgaccaagtctcccagagtaaaaccgtcgtgagcggttacaaagttaattgaacagcgaggaggacgcaccgcggggatattcccggcgccatacatatcttgggaaccagaaagccgggaagccagttcaaaggggggagccccccgtgactcgccgcgcgactgggcacgcccatcggccacccaaaagccgcgcaccgcatcccggtaacgatcattccaggtagagaaaggtagcgggaaatcgctggtgcgccaaccatccggtcccatatcccaaggctccgcgatcatcttggtgtgccgcaagaccgggtcgtccaggcaggcttggaagaaaggatggaagcgagtgaaatgttcctcgcctcgcccacaggtaacccccaggtcaaagcggaaaccgtcgactcccacatcgccagcccaataccgcaaagaatccagaatcatttggattactcgcgggtgaccagtatccaaggtgttaccgcaaccggaatagtcgatactggccccttgaggatccagacgataatacatggcgttatcgagggcgcgccaagatagcgcctgcccatcgcctccgccctcacaagtatggttataaaccacatctagtagcagttcgatgccgttttggtgcaagatcgaaaccatgccccggaactcatcgaggactgccatcggccccagattgcgggcattcctggtggcataggaaggttcgggggcgaaataagacagggtggagtacccccaatagttacttaagcctcgctcattcaggaatgcttctgaaagtttcgcgtgtactggcagtagttctacggcagtgacgcccaagtctttcaggtaagcgatagtggccgggtgtgccagccccgcataggttccccgcagttcttcgggtactcccggcagctgtttggtgagtccctttacatgtgcctcgtaaataacggtgttttcccaagggatagcgggtccgggtgccacggcgaattctttaccggtgactaccccgcgcacggtatagggagccgagttggtgggatctagctggaaaggatgcagcgggtaaagctgatcatcggttttatgagcgtaagtttggctagaaagctgcacattgccgctaatagcacgggaatagggatcgagggcgagtttataggggttaaaaacgtgtccccgttccggatcccaaggcccccaggcgcgaaaaccatagtaggtgccggccagtaccccggcaacatgtccatgccagatgccctctaccggcccgagcagccggtagcgagtttcgggagcggtaggttcagcagacgtgaaaaaacagatttccaccgcagaagcattaggggcgaccaccgcgatatccaccccgttgccttgtaggtgaacgcccaaccggctggggtcggcggcgccgccatgcacataggggctggacggcctgaaaaagtcgtctaatacttgtcttgacacgtctgtcatcttatctggtgctacaaaatagagccattcctctatctaaaccgggtgggctgaacatttaatttcctcccttagctaaggggtagggcttctcactttttcgccgctaaaccttatggcaaggtagaactatgaggattgtcgtaactgtaaagcatgtacccaacccgcagtctgagcggcgcatcgaaaatggcctcttggtacgcggggaagaagataccctgaatgacctggatgagaacgccatcgaggcggcgctcagcgcgaaacaggcggtaccggaagccgaaattattgctttaactatgggaccagagggagcgaagaaagccctgctgcgcgccctccagatgggagcagatcaggcttatcacctctgtgacccggcgctagctggctcggatgtgaccgtgactgcccgggtgctggcgcgggctatcgaaaagattggggacgttgatttggtggtttgcggaagttcctccctggacgggatgacttccatgctgccgggagccctggccgccactttgaacctgccggtgattagcgatgcctctgaagttagtttcagcggcgaggccgtggcagccacctgttatcaagagggtaccgccttgagcttacgggcgaaatatcccctggtggtttcggtaaatgatgaggccaaccggccgcactatcccgggtttaaagaaatgttggcggcgaagaagaaaccgatagagcagtgggatctggtgcagctagagctgagtgccgaagaagtaggggccgctgattcgggaaccgaagtgttagatgctcagctatatcagcaaaccaagaaccagggaaccatcgtcaccgattccgcgaacgctggcgaagcgctagcgaagtacctggttgaatcgggatttgcgcaggagaagtaggaggaaatcgtgagtgaaaaaatagaaaaagatgtcctagtttttgcccatccggatgcggctcgtccccagcatttatcggtggcggcggcgcgactgattactttggcgcgcgaaatcaccagcggtaaggtagtggcgctcgcgccctcctctattgcccctctacaattttctcaggtcggggtggcagccgtacgttattttgatccggcagaaaccggaacctggcaggtgggggcagttttggctgacctggtggtctccgcggcaaaaagcggcgacttcggggcagtgttgctgccctcgacctcttgggggcgtgatggcgccgcccaaagcgcgattatcctcggctcgggagccagcgtggacgtgaccagcctaaaggtagctgacggaaaactgattgccggtaaatcggtactcgatggtacttgggaaaccagttactttattcgccgcggcgttccagtggtcgccatgcgcaccacttccctttcggcggtaccggttgcggaagccggcgaagttgaaactgaaaacctgcaggtagagctgcgcgaatccactaaacgaatccaagtggtctctcaggaagataccggatcttcacatgcgggactaactgaagcaccagtagtggtttgcgcgggtcgcggggttaacggcgatttcgggcctgccgaagaactggccgaggtgttgggcggatccgtgggggctacccgcgtggcttgcgaacaaggctggattgaccgcgctgcccaaatcgggcaatccggtatctctattgcgcctaacctttatatcggcttgggggtttccggggatcaccatcatgtgtgcgggattcgcggagccaagaaaatcgtggccatctgtgatgatcccgaggcgcgcatttttgaaatggcagacttcggggtagtcggggacctgttcaccgtagttccggatgccctctctagaatcaagccgctggacgcatagtggagctggcctacctcgataacgccgcctccgagccgctacggccgcaggcactagcggcgctgaatgataccgccgctagccttgccggaatcggagccaatccttcttccgcacacgcggcggggcgcaaagccgccgcgctgctagagaccgcgcgcgcccgagtagcgaagtctctgggggcggatccggcggaagttattttcaccggagggggtactgattcttgtgccctggcgctgcgcggcctggcgagggcggcgcgccgtcaggattctcaccgcacccaaatagtaatcagccaggtagaacacgacgcggtcaggcttaacgccgctgacttggaggacgcaggatttcaggtgcaggtgttgccggtagatgccggcggggtagtcgatctggaagccgtagttgccctcgatacctcccaaatcgcggcgatatcggtgatgagcgtatgcaacgaaaacggggtcatacagccagttgctgagctttgccgccggctgcgcgaaaaagcagcagcagatacgcgggatgcccagggcgatagttctacagctgctaaaggaaccgggagtggtagggatagcgggttcgctatccacactgacgcgattgccgctgccggacgccaagaaataaacttcgcagaatccccggtagatgcgatttcgttagcgtgtcacaaagtaggcggcccggcagccctcggggtgctgctggcgcgccgggaagtaaaaatcgctagtgaccgacgcgggggaggccaagaacgggcgctgcgagccggaacccaagacgtgattgccgctgtaggggcagcggcagcttttgaggcagcccagcaagaactagtagaaactacccggcgtcaccaggatttacgggagaaactgctgcaaggcgcactggcgattccgggagtaaaactcgccagcaacgcgccggcagtacccggaatcatccagtttgcgctgcaaggcgcggaggcggaagggctgctatttgccctggatcaggcaggaatctgcgcctcggcaggttctgcctgccacaccggggtagcccgtccctccccggtactcttggcgcaaggctatagcgagcaggacgccctgggatctttacgcatatctttcggctggtccacgcgggagaaggacgtagaccggcttttacaggcactaccgtcagcgctggatgcctcccggaaactagcagagcgggagaggaaataaatgaaagtattagctgccctctccggaggagtcgattccgcggtcgccgccgccctcgccaaagaggccggacacgacgtaaccgcggtacatatggccctgtccgctaaccaggcacaaaaccgttgcggttcgcgaggctgctgcaccgtagaagatgcttccgatgctcgcctcgccgcctccatgctggggattccgttttacgtgtgggatatggcggaaacctttgaggaaaccgtagtggaagattttctgaacgaataccggcgcggacgcacccccaacccctgtgtgcgctgcaacgaattcgtgaaatttagggaacttgctacccgcgccgatgccctcggattcgatgccgtatgtaccgggcattacgcgcgcgtattgaggggaccaggcggagtggaactgcaccgcgccaaatgcatcgaaaaagaccaatcctatgtgctggcggtaatggggcgtcaggctctagagaaagtgattttcccgctaggagagtatgaatcgaaaagccaggtacgcgcggaagccgagcggcgcggcctgcccatgtcagccaaacctgattcttacgatatttgttttatcgctgatggggatacccgcggatttttacgttcccacctcggcagtaaggccgggaaaatcgtggatacggagggtgcggaagtgggcacccattccggtgcctatcaattcactatcggacagcgcaaaggcctgaacctgggccggcccgctgccgatgggcgtccccgctacgtactcggtaccgatatgaaaaccaacaccgtagtagtcggtgccagcgagttgctgagcgtagacggaatcaccgctaccgacgcagttttactgaccgaacctgatgatccggcattatctgggcaggtagaggtgactttgcagtatcgggcgcacggacaacaagtaccagcgaaagttcacttagaggcagacggtactttgcgcgcccagctgctcatccctacccgcgcggtcgcctgcggacaatcgttagtggtctattccggggatcgcgccatctgtgaggcaactatcgaacaggcgtttaagcaggaaaatgggcagtagccgattctgggactggaaagggtaacctgccttaggttaatatattcaagccagcgcgagtggcggaattggtagacgcgctagatttaggttctagtgtcttacgacgtgcgggttcaagtcccgcctcgcgtaccagatgtagcggctctgaccagcctaaataaagtggtagagttaaaatcaatacagcgcccgggcgctgctatctctatgtttagctatttatgagggagtttcgatgtcagagttaaccccaggtcaaaaggcaccagatttcactttgcccaccgatcaaggcacagaagttagtttgcgagggctgttggaggaatccgaaaagggcgcggttgtctacttttaccccaaggcttccaccccgggatgcactacccaggcctgcgatttccgtgactctataaactcgctaaagtcagccggatacgcagtggtgggaatcagccccgataaaatgccagccctggaaaagttccgggacaagcaagacttaaactttccgctagcctccgatccggaacgggaagtaatgagcgcctggggagcctatggggaaaagaactcctatggacgcctgattaagggagttatccgctctaccatcgtggtcggtaaagatggaaaagttgtgctggcgaaatatcgggtacgcgccaaaggacatgtggctcgcttgcgcaaagaactgggaatcgattagctctgcagagggagatggggaactttagggttaatacctgaatgggggtgcggatctctgcgaaggcctttgccagctttctggcaggctgtggcgaacttgacggcgccgtaaagcccatcgcgatcggtcagcgcttctatccaaaaccgttgcactgcacatatctgccagtggttgccttgccagaagaatcgtttaggcggggtgatcgtagcctcaagggtttgcctcattccgaacctcctaaagttatagaacatttgtttgaatgtaggaatactttagagctcggcagtgacaattttttgaggtatggcgaaaaatagtcggataacttgagcgcggcagattcgcgccccagaccttctgcgtgcgagcggtaatgtgcgacgatgcagatttctggttagctacgcgaaacggcgtggcaaatcctgttgctaagtattgctgtcgttagtcggtgttgatggtgccgcttaatttctcatgaattttagtggtcggcctattcatgccgatgaactcaacgctcttgcctagtttgcgatatttttcttggactgcgtctagcgcacccacgctggaggcgtcccaaatgtgggagtcggtaaaatcgatgatgacatgtttgggatctttggtgtattcaaacattgttgtcaggtcgtgactggacgcaaatagtaacggcccgtcaaccttgtaaagtgcgacttcctcgccgtccacctcatcagatctgcgatgaacttcaaccaagtgggcaatgtcgcggacgaagaacactgacgctaccaggacaccaataattacgccgatagctaagttgttggttgccagtacgaagatgacggtgatgaccatggtgatcgtttcgctctttggcaagcgctttatggtgcttggctgaatcgagtgccagttgaaagtgtcaatagataccgtgatcatcacagctaccagggcagccatcggcagtttcgccacaatatccccgaacccgagcaacagaatgcagagaaatacccctgccaggaaggtcgatattctggtgcgtgctcgcgaagccttaacgttaatcatggtttgaccgattactgcacatccgcccatgccgccgaatagtgcagaggcgatattggcgataccttggccgataccttcgcgagtcttatttgagtgagtgtcggtgatgtcgtcaaccagcttggctgtcatcaaagtttccattaaaccgacgagggcaacagctatcgcgtaaggcccgataagggtcaaagtatcccaagtgaacgggatgttaaggaagaaaaatttcggcattaccgttggcagagcgcctttgtcgccgacagttgccacgtttacggacgaaaaaatcacgattgccgtcagcaccacgattgatacgagtggagccggaatgactgtggtgattttaggcataaggaggataatgatgacgccaattgctaccagtaagtaggttgcccacggcaccgagatcagctcgggcaattgtgcaaccaatagcatgatggccagcgcgtttacgaaccctgtcattacgctttgggggatgaaacgcataagttttgcgacgccgaaaacagatagcaatatttgaataattccggccagaattatcgtcgccaccagatagtgcattccgtactcttgggaaagtggtgcgacgactagcactaccgcacctgtggctgaggtgatcattgctggccgaccgccggtgatagcaatcgttacgggcatgataaatgctgagaccagcccaactttggggtcaacaccggcaataatcgagaatgcaatcgcctcggggatcaacgccaaactaacgacaagacccgccagagcctcgcgcagtaaggttttagggcttttcagtgcggctagcactgtctgttctgagtgataacgaaccgttgggtctgtcaggttagcggatggcattgaaaaactcctgatctaatgaaccttatcttatcttagtagaatgttgccggttgtgggtgcggcagccggttagatgaaataaaaaattttaagtccaagggtgggcttttgtgtttcgttctttggcgcgcctcggcggcaaaagctagctaagaaaccaagttgccgccgcaacttgcacccagtaaggctacttaggctatgctaagttctgctttggtacgccaccggggactcgaaccccgaaccctctgattaagagtcagatgctctagccagttgagctagtggcgcatcttgaaaggaaaatcgtgagattttcgtacgccaccggggactcgaaccccgaaccctctgattaagagtcagatgctctagccagttgagctagtggcgcatcgttgcataaggcaacggaataaactctaacccgaccggcacgtccttgggaaaccaatgccggcattgggagcagtttcacacgtggaagaaacaaggtcggcgccaggctaaactggggggcatggcgccagcgaaagattttgttcatcttcatgttcataccgactattccatgttggatggggcggctcggatcgggaaactggtggagcgggcagtcgagatcggtcaaccagcagttgccatcaccgatcacggctacctttttggtgcctatgagttttatgctgcggcgcgcaaagcgggaattaaacccataatcggtctggaagcctatatcacccccggcacctcccgttttgaccagacccggcagctgtggggagaagaaagccagagaggcgatgacgtttctgcccgcggcgcctatacccatatgactttgctttcgcgcaccacggaagggatgcataacctgtttcggctaggttcactggcctccattgatgggcaaatgcaaaaatggccgcgcgccgaccgggatctgttggaacgctattccaccgggttgatcggcaccagcggttgcccctccggagaaatccaaacccgcctgcgcctagggcaatgggaagaagccaaaaaggccgccggggaactgcaagatattttcgggaaagaaaacttctttatcgaactgatggatcacggcctgcaaatcgagcgacgagtgcgtaacgatttgctgaaactcgcgaaagtaatcgatgcacccctggtggccaccaacgactcgcactacgtcctcaagagcgatcagcctacccaagacgccttgctttgtattaactcgggttcgcgccttgacgatgaaaatcgtttcaaatttgaaggctccggatactacctgaaaaccgcagaagagatgcgggaactattctctgacttccccgaggcctgcgataataccttgaagattgcggaaatgtgcgaggtgcattttcaaaccaccgctgagggtgccgactatatgcctcagttcgaggtgccttccggggaagacgccaccagttggttcgtgaaagaagtccagcggggattacataagcgctacccgcaagggattcccgaaaaatcacagcaacaggccgactacgaatgcgggattatcacccagatggggttccccgggtacttcctggtggtcgccgactatattaactgggcgaaagaacgcggaatccgggtagggccggggcgtggatcgggagccggatccatcgtggcctacgcgatgggcattaccgaactagaccccctagaacatgggctaatgttcgaacgtttcctcaaccccgaacgggtgtctatgcccgatattgacgtggactttgatgagcgtcgccgcggagaagtcatcgattacgtgaccgaaaaatacgggaaagaccgggtcgcgcaggtagtcacttacggcaaaatcaaagctaagcaggcgttaaaagactcttgccgaatcatggataaaccctatgccctgggtgaccagctcaccaagaaaatgccgccggcgattatggggaaagatattcccctttccggtatttacgaccccaaacatccgcgctacggggaagccagcgagtttcggcaatacgtttccgataacgagggcgaagtaaagccagttatcaaaacggcgcaaggcctggagggacttacccgccaatggggagtacatgcctgcgcggtgatcatgtccagccatgatttaaccgatattgtgcccatgatgaaacgcctggcagacggggcaattatcacccaattcgactatcccacctgcgaaaccttgggattgttgaaaatggattttttggggctgcgcaacttgacggtcatctcggatgccctcgacaatatcgttgctaacgggaaagagcccctggatctagagcacgttccccttgatgatcgccccacctatgagctgctatcgcgcgcggaaaccctaggggtatttcagctagattcaccggggatgcgctcgctgatgcgactaatgaaacccaccgagttctcggatatctccgcggtcggtgctctttatcgccctggtcctatgggggcgaactcgcacaccaactatgctttgcgcaaaaatgggcgtcaagaaatcgaacctatccatcccgcgctttccgaggccctcgccgatattttggatgaaacctacgggttgattgtctaccaagagcaggtaatggcgatcgcccagaaggttgcaggctattccctggggcaggcagatattttgcggcgtgccatgggcaagaaaaagaaaaaggagatggataaacaatattcgcgcttccacgatgggatgattgagcgcggatatcccgaagacgcggtcagtaaactgtgggaaattctggtgcccttctcgtcctacgcgttcaataaatcgcactccgccgcctacggcttagtctcgtattggaccgcctatctgaaagccaactatcccaccgaatatatggcggcactgttgacctccaccaaagataataaagataaactcgcgctttacctgcgagaatgccgccggatgaatattgcggtactaccgccggacgtcaacgcctccgcctctgatttcaccgcggtcggcgaatctattcgttttggactttccgccgtgcgtaacgtgggtaccaatgtggtggccgaaatcgtgaacacccgaaaagaaaagggtagttatacttcgttccacgacttcctggacaaagttcccatcgaagtttgcaataaacgggtagtggaatccctgattaaagccggggcattcgattccctagggcatgcccgccgccccctcgaatctatccatatcgaggctgtggactccgttattgacgtgaaaagaaacgcggcgatggggcaagaagacctcttcgggatgatggacgcagacgaggcagttacttttaccgtgcaaatcccggatctacccgaatgggataagcgccaaaaactcaagttcgagcgcgatatgttagggctttacgtttcggatcaccccctacaggggatggaaacgattcttgcacacaatagcgataccgaaatcgtggatctttcagccgaagatggagtcagggatgggcaaaaaatccagatttgcggcctagtcaccgggctgcagcgcaaaactactaaacgtgacggaaacctgtgggcaatcgccaccatcgaagacatttctggttccaccgatgttttattcttcccgcagacctaccaaaaatattcacaagacctggtagaagacgaaatcgtgagtgtgagcgggagggtcaggattcgcgacgaagaagcctccctgcacgcgcaagaaatgaccctgcccgacattagtcaggtagcaaccgggccattaaatatctatatcgccgccaatcgccttaccgaggaggtggcggagcagctgcgggagatcctggcttctagtccggggcaaagtgaagttaggatgcatctgcgcagctccaggggtactaccatcgtgcagctgggcgatgatttgcgggtaaatcgcggctcgggtttggcggcgcagctgaaaactctgctcggcctccactgcctagaaaaccgcaaatagctttccttacatcgcaggttaatcggtaccctacggtgcgggtcaagccgtaaaagcgctcgggggaccccggtgattctcgcttcgctcgactcaagccccctctcgcatcttttacggcttgacccttgtgcgcgggggagaagttttatccgaataggctaggcgggcgtaaaaatcggacaaagcttcgtagctttgtccgattttttgggcgggaggaaaaacttcgcccccgcgctcaaccgagcgcttttaccggccgcaacccgtcatttgcgggggagattaatgggaaacttgggcacccgtagcgccattcgggaggttgatctgcacgatatcgccgggggagagggcgctgccgcggcgggtttctacctcgccgttgacggtaacgtcaccggattggatgaacacccgcgcctccgctccgtcctcgaccaagttcgccagctttaagaactgtcccagtttgatggttccgcgcaccggaatagccggtagagacgtgctgttattatctgccacgcagtaaatgatactaaactggtggaagcatgactttattaaagcaacttggaggagctaaatgagcaaccccgaaccgcaaggattcccacaaagtagtcctcgcagcggagctaactggccttttacctcgtctcaggggcaggcagcgcctgggcaggaaccggctccggcattcccggctccggcaactccgccagctcaaaatgttcctcaatacagtcagcatccggtgcaatcatcacagtatccactggctggtgggacgccgctgcccgccgcagcgaaaccggcactgtcgcagcctgacccggcttttgccaatccggaactagctcagccgcagtcggtagcgacgggtaatcctttgcccgcggctcaacctgcatctgcgccggtagaacagctgtcggcctcgcccgtttccgatccgctgcccgaagatcggtcggtggaagaccccaccggggaaactccaattgctgactctcaggcagcagctagcggtgtcactgaacctgatgtggcaagcgaagaggtagaaaaagacaccgggtctgcagcgaaggggattcaggaatctttgcatcaacaggccttaaccccctggtggctagactgtttaatggcgctgtctctagctggagtgatggtgtttaacgggttcggaatgtctatgtggctgcggatcggttctctgattgtcatggtgattgcgctgattttgctcacctggtatcagggggatgcgcaagaaaaatccaatactttcctaacggctacgctgctaggggtggtatgcggtttcctggccggactaatcgtagttgccgcttcgctatatatggtggcgccgattcccgcctggtatccctgggttctatggctggtaagcggggttttactcttcttaacttatcgcggattccgcgactgggtaatacagaacctgcaaaagaaatctcaccggaagtccactaagtaagtcaaaacattttatctactggacgaaatctcaaagaacaggtagtaaaaactaatatatcctcatgctctcaattactgattttcgcgcaaacatgcccagtggtctggaactacgccaggcgctgccgcgcgcccaaatgaacatagaggaggcggcagagaaaatccgtccggttatgcgggacgttaaagaccgcggtgccgccgccctccgggaactttccgaaaagttcgatggggtgcggcccgaacatttgcgagttccagagcaagaactctcccaagcattagagcagcttgatcccgcagttcgcgaagcgatggagctatctatcgaacataaccgcgccggtcaccgcgcacaggtgcctagcgagcgggtaaccgagataatgcccgggggcatcgttaaacagcgttggattccagtagagcgagtgggtctttacgttcctggaggcttggccgtctatccgtcctcggtaattatgaacgtggtggccgctcaagaagccggcgtcagcgagatcgcagttacctccccgccacaagcccgttttggaggccgggtccaccccacgattttggctgcttgccagttgctgggggttaaagaagtttacgcggtaggcggggcgcaagcgattgccatgtttgcctatggggctagcggggaagaggggttagaccccaatccgctctgccagccagtagatgtaatcaccggtcccggtaatattttcgtggccgccgctaaacgtctggtacgggcggtttgcggaatcgatgccgaggctggtcccaccgagattggggttattgcagacagcagcgccgaccctgtcctggtggctgcggatatgatttctcaggccgaacatgatcctaacgccgcttcggtacttttcaccgactctgaggaacttgcacgcgaagtcgaaaaggaaatcgttccggccgcgcaggctaccaaacactcccagcggatttgccaggcactaagtggtcctcaatctggaatcatcctggtggctgatatagctagcgccatcgaggccgctaatgcctacgcgcctgaacacttagagattcacaccgccaacgccaatgaagttgcagagaaaatccgtaacgcgggcgcgattttcatcggttcatacaccccggttcctctcggggattacctggcaggctctaaccacgtcctccccactggaggaaccggacgctatgagggcggactgtcagtgatggcatatctcaaacccgtgcaacaggtcgagtaccagcgcgatgccctcgaaaaaatggcgcgtccgctcaccgcgtttgcccgcgccgaagatcttccggcacacgaagaagccgtgaactgccgatttagatagataacagataggaataactatggcagaaaacaatgtacgtatccccgctgtttttaggcagctgctgttctgggtattggtagcaattgtggctggggctttgattggtatgatcccgggcctgcccaaaggattcatcgcgcccttcgctactttcaacgacattttcggcaaattcttgagtttttgtatccccctaatcatcttggggttggtggggccggcattagcagatctagggcgaggagccggtaaatggttactggccaccgtagcgatcgcttatggttccaccctgttcgccggtttcggtacctacgggattgcctcagtgattttcccgcggattctcaccgagtcggctcccgaactaaaagaacctaagaacgcggtgggatccctgctgggagataacctgaacattactccggtactggatgtgactggtgccttgattttggcgtttatcctgggtatttgcatggcagccttgaatacccccactttgcatcgcgcctatggggagttccgggaaatcaccatgctgatgattaaacgggcgattgttcctctgctgccgttgttcattttcggcaccttcttaaatatgtcctattctgggcagattgcgctggtcataaaggtaatgatcaaagttattttggtgtcggtaatcctgaccattgtcttgctgctaatccagtacacggtggcgggtgcgattgcgaaagttaacccctttgtggcactcgggaggatggcgagagcctacttcaccgccctgggtacttcttcttctgcggccaccattccggttacctaccagtgcgcccgcaacaatggagtatctgaggagatcgcgggctttacaattccgttgtgcgctaccattcacctgggtggttccacggttaaaatcaccgcttttgccctggcagtcatgcagatgaccgggcaatccattaccttcgggaagatggcgatggccatcattattctggggatcactatggtggcggcaccgggcgttcccggcggcgccatcgcggctgcccaaggcgtgctgatgggcttcctcgggttctcgccggagctttactccctgatggtggcgctctatgtagcaatcgactccattgggactgccactaacgtgactggtgacggcgctatcgccctggtagttaacaagttggccggtggctcgcttggcagcgaaaaaggtcatgccatggccaccgcggaaaccattgtttcagccactgactagcagctgaccccggttttcccccgccgcacgcagctttcggttttcgtcctcagaaaaaccgagaccagctgatcggcgggggcgaaacattgtctgggtaatccccttagaatgggagcaagaaaggaacgagcatctatggaacagtcccccttgctgccgttgcgggaagaactcgcgcaggttaccccctatggggcgccgcaattggacgtggctgcccggctgaatgttaacgaaaatccctatccgcccagccccgggatgatcgccgacattactcaggcggttgcgcgcgcagcggagggcttaaaccgctatccggatcgggatttcaccgccctgcggaaggctttagccggttatgtgcgccgcgaatcggggctcagtttcccggtcgagcaaatctgggctgcgaatggctctaatgaggtaatggcgcaactgttgggcgcctatgccggtcccggccgtacggttttgggaacagaatattcctactcgatgtatcccgagtacgtgcggggcgcgcactcccgctatgttagggttccgcggcgcagcgactataacgtagatgtggatgctctactccaggggctgcgggaagttagccctagcgtgttgctgctggcaaacccaaataatccgaccggtaccgctagcagcgaagcggaactaatacagattttgcagcaagctagagaaaccgggccggttatcgatgacagacgcaccgctaccgtggtggtagttgacgaggcctacgcagagtttcgcagcccgggtcagcccagcgccctcgccctcttggaaaaattccctcacctggtagtttcccgtaccatgtcgaaatcttttggaatggcagggctgcgcctaggctacctggtggcggcaccagaggtgattgccgatattatgcgggtacgtttgccctatcacctctcggcgctgactcaggcggccgcgattgcggctttagggcacgcggaggagcagctacgtcagttggccgagctgcgcgagcgccgcgacaacttggcgtcttggctggagagtaaaggctacaccgtgcctcgaacccaagctaactttgtgctttttggaccgttcccggatcgacaccaaatatttagtgatttattggatcgcggagtcctgatccgagaagtcggtccggaaggatttttacgggtaagtatcggcaccagccaagaagaccaggcatttcgccaggcactagaggaggtaaccagatgagtcgcagcggaaaaataacgcgcaaaaccgcggaatcggaaatcacggtcgagatcaacctagatggcaccggtaaaagcgagattagtaccggggttccgttctatgaccatatgctcaccgccctttcaaaacattccttgattgatatgaacattgccgctcgcggggatattgacgtcgatgtgcaccacacggtagaagatactgctatttgcctcggcgccgcgctgcgccaagccctggggaacaaggccgggattcgccgctttgccgatgccaccgtgcccctagatgaggcgctagcccgggcggtagtagatgtggccggacgcccctattgcgtacatagcggagagccagccggccaagaatatcacctgataggcggacactttaccgggtcaatgacccgtcatgtgtgggaatctttcgcctataacgccgggatttgtctgcacgttgaggtaattgcggggcgcgatccgcaccatatcgtagaagcacagttcaaagcagtcgcccgggcgctgcggggagcggtggaaaccgatcctcgggttagcgggattccttccactaagggcgctctgtgaacgccgggaaacttccggaagaggacgatccgcgcgataaagatccgcgcgaggaagagcctttgcgggataaagaatctaagccggaggactacttcgaccaagtaatcgcgcagtcggggattaggggcgaagacgtagacggtttcggtaaagaggttgaccaggatttgcaggcctggcagcatttagaggcgctatctccggaagccggggatgtggcactggtattaacgaacttgctagagccggtgccgctggccactatgatggcggctcatgagattgatgcccggatcgtggaaaccgagtctgggtgtgtagtgtggaaacgcctaactcccacccccgatgatgagctagaggcactgctcggtgacgaacgtccagtatcgcccgaggccgaagaactggcgctcgcggtatcaaaaatcaccccctatggggcggtcctatttgtgtctactttgcgttcggactccgatgatgatcccggcgtgcagggacaaatcacggcgcgcgtctactatgacgggcattttgaccgcactattcccgctggccccctggtgtcatgtgctgatgaacgcgtagaagatctgttgctggggcggacttctcccgaggactatccccagattcgtccgcctcgcctgcgggatttaccgggacttttgctgcggcaactacgcgaactgcaagaggactataaccgtcgggacgataggggaagccaggaggataaaagcagtgactaagcgggtagcggtgtttgactatggctcggggaacgtgcgttcggcggttaacgccctccgccgcctcggggtcgatgccaacctgaccagtgatttttccagctgcctggacgctgaagggctgttagtgccaggggtgggggcttttgccgcggtgatgaaggatctgcatgctcgccgtggtgacaccattatcgaccggcgtttagctggtggcaggccggtgctgggaatctgtgtcgggatgcaagtgatgtttgaacgcggcttggaacacggtgaagacactgcggggatgggggaatggccgggaacagtcgagaagttgcgcgccccgattctaccccatatggggtggtcaaaaatccaggtaggtcagggttctcagctattttccgggattgaggatcagcgtttttacttcgtacattcctacggggtaaccgccgatcctgccgggcattatcggcaatcttctcgcatgaaacccccgattttttcttggggaacccacggcgagcgtttcattgccgcggtagagaacgggccgctagcggccacccagttccatcctgaaaagtcaggtgacgccggtatggaactccttcgtaactggacacaaaccttctaagggagaaaaatgttagaacttttaccggccgtagatatagtcgcaggtcaagccgtacgcctacatcaaggcaaagcgggcagcgaaaaagtttacggagttcccctggaggtagcgcgcacttttgaggcagcaggggcccgctggctacacctggtggatttggatgccgcctttggacggggaaacaacacccaagtggtgcaagaaatcgttgagcaggcaggtttgcaggtagaagtgtcggggggaatccgcgacgatgaatctttggaacgcgtgctttcggcaggggcacgccgagtaaacctgggaaccgctgcgattgaaaaaccggagtggacctgccaggtaattgccaaatacggtgatcagatcgcagtagggctggacgtgcgcggacatactctttctacccacggttggaccaaagatgcgggaaatctttttgaaatgattacccgcctagatgaagccggttgcgtatgctacgtagtaaccgatgtgatgcgggatggtactttgaccggcccgaacacccagttgctccaagaagtatgcaaagccacctccgcgaaagtagtagccagcgggggagttagcaccctggatgatttacgcactttgcgcgagctcaccagcatcggggtggagggcgcgattgtaggccaagccctgtattccggacagttcactatcgagcaggcgctggcggtcgccagcgggagagaataatttgttcgtttctaaccctaaaaactcggagttttccggcgggcaatccctatcccctgatcgagaaaacgcgattttacgcgccctgagacgcaacgttaatcccgctgattgcggggatttagaaccgagaatggcggcggcgttgaaccgcggtgacctgggggagcggctgaaagcgatagcggaggctttaccggaagggcgggtcatcttgccggtacttccgcacggaatctctagcgaggatgcttgccccagcggacaacttccgcaagttagcctaaaaggcgtgagacctgcgcgggcagtccctattttttcttcgctgtcagtatttgaggaggccgtaaaggctggtttagctgcccagatagcaacgagcggcgaaagtcaccaacaagtgcgcccgttgccggttagtggccgcgccctcgccctcgccgccctagattcgcccggccgcctgctcttggatggccgctacctcttgccgcgaccgctgcttaatgctttggcctgcgctgatacttgggtgcctagctgggaaaatcagcatttcttaactctactaacgcggctttttaaggaaaatctgcctacggctacctggaaaatcatccctcaagaagcagcacccgaccggctaatagtgtgggtagatcccgctacgcctgctcttgctcagtccctaaatgctttacaaaagggaataaattccctggataacctggaggctgctgccgacttattggaggtaactccggtgcctgcggcaggataacgggtagcaaaccccagggattcgcgcgctaaacgttaacccgggaagcctccctagcggtccacataaatcatgcgtttatcggcaggcacagttttctcgggcaagacgctgtcgcctttggtcttcagaggtttattggttttggggaaggctttgactaacgcctgagagaaatgtagggaacgctgggtgttgccctctgggttgtagtgaactccgtcgccctgcaggaaccagctttggtcaacttcctgatcccaccggtaaacccacaggttgggataggttgacatcgcggcgaacaaggattcgttccaatgctgcatccggggaacctcgtaccagcggggagccatagtagcggaggtggtgggggcaatccacaataccgggtagttggagcctaaaatcgccatggtggcattgatttcatctgcggcatcgtctcgtccggccgctgccatattggcggcattatttaccccgagggcgatcacccagcaggtttgtggatctacgccctcgttaagaactctctgaatggaatcattgccggtggggttatcaccgagtgacgcattggtggctcgtgcccctaaactgctgttaatcacagtttcggcgcccaccgcccgataggcggcctccccggtttgttctgggctgttgacggaaccagcattaaacatccccagcgaagtggagtcaccaatatgaaccacttcccggcaacgtgtctgcgtgtacttctctccctcagaagttccctgttcagaggctgctttctctttagcggctttaagtttttgtgccgcgagtttttgctgagctaaatcttgtttttgatagtagtcctcagctgcgtaggctggggctcccaagagggcaatcgcacagcctaaggccaccggaagcgaccagagaggacgcgggatccgcctacgtcggttggtcatatactcccaggtaggcttaaacagacctttgcgcctgattggatcctccactaaagaccaggacaaagaagccagaataatagaaaccgccatcactatcagagttgcggcccaaaccggcaggtcatgtagcgggcgggataagaacgcaatcaagggaatatgccacaggtagagggcgtacgaacgttccccgatccaggcaaacggacgcaatccgaagactttataaaccagagtttttttattgctcacccccatgagtagcaaagtggagaatcccgtgagggcaagtattcctccgtggtagagcaggggagagttgtcggggatcaatatgaaggaagcgataatcccagctgtccccaccaggccggctatctcggcccataggcggggagaaccggttttattacggttgctgtaatagatggccagcgccgccccgaccagtagaccacctgcccgggtatcggtaccctcatagacgcgagtggggtcggctcccggagtaaataagtaccacatccaggcgaaggaggcggccgctaacagcagggtgaagacagttaccaggaatcgtttcttgcggaatagcaccagtaacagcagtaagatcagtggccagaaaacgtagaactgttcttcaatcgacaaggaccacatatgttctagcggactggtttggaactggtcgaaataggaattccccgagaggatagtcgtccagttgttgacatagaaaatcgccgccagcccggcaaaaagatttagtctaaagtcgtcgggtttgaaaaacgcggttagcatccagacagccaataccgtgacgattactgccggcattaggcggcggatacgtcgcagccagaagttccccaagcgtagggttcctttccgatcccagctgcgcattaggtttccggtaataaggaaacccgagatagtgaagaatacccccacacctagcaggccgccgggtatgaagttgatcttcatgtggtacaagaccactcccacaactgcgagagtacgaattccgtctaatgcggggttatagcgagatgagtctccgattggcttaggcactgttagttaatccttggggttgaattacaggctgttcggtcagtatacgcttcccggcaggtgccttcgttccgctgttcgccggttatccgtcctcagaaatagcgattttattcttaaaaaggctgataaaaggcggttagatagccgtgttgcttcgaagtgttcgccaaatgtttagtgatgctcacaatttgctatttcttggggagtgcgcaggtgccggcggtaaaccagaggccgcagcgcggctgccagggcatagagggtgatgagccccatgacaatagccgaaccggaggcggcggcggtgaaataggaaaacaccagtcccgcgatacacatcactacccccaacgccattgcccatcccatagtggagctaaaagagcgggcataaatctgggagatagctaccggtacgatcattagcgccgaaactagcagcactcccaccacccgcatcgcggtagaaacggttagagcgctgactaccgctaaacaaatcgtcagcagccgtaccggaatcccggaagctaaagcgaattcctcgtcgttacagatagaaaagagttcccggcgcagccccagaccgaaaaccagaattaacaccgatagggcaatagttaggtacacatctgaccacgaaactgcggcaatggagccaaacaagtaagagtttaattggttggtagtgccgcctgccagggaaatcactaacaccccggaggcgatccctccgtaaaataacagcgccatcgctacgtcaccgctggctccccccttggcacgtaccaattcaataatcaccgcccctacaatcgaggcgattaccgctccggggactgcgagggcgtctcctccggctacttccgttagattaccgactacccaaccgagcgccaccccagtcagggcgacgtgaccgatgccgtctcctagtagggataggcggcgttgtaccaggtaggttccaataatcggggcactaaggcctaccagcaccgccactattagggaacgcaagaagaaaggggaggccaataaactgttccagtcagcttcgaagctgggcagggagccaacgaaagtggaagaaaggccgaggctgggctgggggctgatcgtggcaactgacaggggcgtgctggtaacggtaataatcatttttccgctgcctcctcgtgcaactcgggccgtgaattctggttagtgctgtctccggtcaactgcccggacaccaaagtgatagtccggtcgatcaggggtgctaggaaaccttgttcgtgcagcacaatcagcatggttttgccggcgtctttagcttgaccaatggtgttagctaggctttgggcgctttgacgatccataccggccatgggttcatccataatcaggaattcaggctggcgcaccagagcgcgagcaatcagtactcgctgttgttggcctcccgacataaactgaaactttttgccggcggcctgagctaaccccactttttctagagcgtttagggcacgttcccggtcggagcgtttcggtccgaggcgtcctcgtcgcagcaacccggagcgcactacctccagggcggttgccggaaccgttcctagattgcttttacgttggggaacgtaccccaccctggacagggcttgaggataatttttctctccgggacgggcaccaaaaatttctaagctgccggaactgactgggtttagccctaccgctgctctaaccagcgtcgattttccggagccattttctccgcatagcgccaccgtggtgcccgaggtaatctgcaagttaatattgttcaggatcaaattgccttgaagggcgacagataaccctgccgccctaaaaggtagagatcctttagtctcggttactggcatttcatcgctttacttagttttcccagattgtcctgcattacctgcaggtaatctcggttcttatctacttggatttccaaggggtcaagtacctcggacttaatccccagctgctcggctaaagtcttggtgtctttatcgccgagggcgctctccgaaaacaatacgttgacttttttggctttcgcaatgttggcaacttcctgtaggcgagtgagcgaagtttcggcttcgggatcgaccccttttacccccacctgctcgaatccgtaacgatccgccagatatccgtaggcttcgtgggcagtaactgcggtgggggtggcgcatttagtcaggccagcgcggtattccttatctaggacagccagtttatcttgcagtgccttcccatttttcttaaaagtatcactgtgtttggggtcggccttgctgaggatggcaaccacctggggtaccacttgggatagccgctggggatctaaccaaaagtgcggatcaaaagcgccgtggtggtgctggtcgtgaccggcttcttcctggtgctcgccctcgtggtcagcttcatgcttgtcctcgtgtttatgttcgtgttcttcttcgtgctcggcggcttctttggctgaaagtttcttgagttgggcggctttggctacatccaaagtattcttgggagccgcttcttttaccgcgtcatcgacggctgcctggaatccggacagatagatcagggcgtcggcacgagacatagtggtcaggtctttcgcggatagctctacttcgtgggcttctcccgagggcgtcaggttagttacctgcaccaaatccccaccaacttggctggttacgtaggccagaggatagaaagaggcgacggcatcgacttttccactttgctcgccttttgcacctgcagaacaacccgttagtgctaaagcgccgatcgcagcggcgcagattatttttcgcattccttttttcatagccaaaaatataaacgataaccgttctcaaaagcaaaatgttgggcaccacgacagtaatgagaaaaactccaggtgaacccggaaaaactgattttttctaggtcgctaccttctttttagagttgtaagtcacgctctgccgttccggttctgggaaagcataggcaacccggtagaatctggggtggtagcgccttggcgcggcaagttgagcttaaggagaaatacagtggctgaaacgccctcgaatttggatagtgttatcaatctggcaaagcgacgcggctttgtgtacccctgcggtgaaatctatggtggaacccgctctgcctgggactatggccccttaggggtagagctcaaggaaaacatcaagcgacagtggtggaaccggatagtgcgttcgcgcgccgatgtggtgggcctggattcctcggttattttgccgaccaaagtctgggaagcctccggtcacctcaaagctttcactgatcctttgattgaatgcactgcttgtcatactcgccaccgccaggatgacctgcaggaagcctatgcggaaaagcatcagctgccctccgccgacgaggtttcgatggaggatgttccttgtcctgcttgtggaaagcggggacagtggacggagccgcgcgccttctcgggattgctgaaaactttcctggggccggttgacgatgaaaagggtctgcacttcctgcgtccggaaaccgcgcaaggtatttttattaactttgcgaacgtgatgtcctctgcccgaatgaaaccaccctttggaatcggacagattggcaaatccttccgtaacgagatcacaccgggcaacttcattttccgtacccgcgagtttgagcagatggaactggagttcttcgtagaaccgggaaccgatgaagaatggcatcaatactggatcgatgaacgtctcgattggtaccagaacttggggataagcagagataacttgcgtctatacgaacaccccaaagaaaaactttctcactactccaagcgcactgtcgatatcgaatatgccttcggattccagggatccaagtggggtgaactagagggtatcgctaaccgtaccgactatgacctgggtgttcatcagcaggtttcgggtaagaatctggactacttcgaccagacaaagggagagcgctggataccctacgtgatagagccttcagcgggacttactcgttctctgatggcgtttatggtggaagcctattgtgaagatgaagcacccaatgccaaggggggagtggataagcgcacggtgctgcgcctggatccgcgtcttgccccggtgaaggtcgcagttctgcccctttcccgcaaggatgagctaactggaccggctcaagagattgcccaagatttgcgagccaactggaatatcgagtatgaccaggccggacaggtaggccggaggtaccgccgtcaagacgaaatcggtacccccttctgtgtcacctatgacttccagtcgggcgaggaccagtgcgtgaccgtgcgtgaccgtgactccatggagcaagaacgggtaaagattgcggagctaaccaactacttagcaacccgcctggtgggctgctaaaggcggcacgcgtttgcatcagcacctccgtcgttccggccattctcgtccggatccgcagtctctacgccgtgcgcgtcgcgtactaactgcactgatagtgccggttttactggcgattattatcggtatcgtaacgctttacagtccgaaacccttaggggatgcctcgcaggactggtctcagcaggggactaaccgtttgagtggtcaggtgacgggcttggatggaaagaaatgtctgattccgggactgaaaatgcccaagggagcagctgaccccactaacggcatgccggaaacccagcccttggtgtgtgtgaaagtgctggaagggcaatggaaggacaagattgtccccgttagggttcccgaagaatccaagtcggcgattcgagtagggactgcggtgtggatgctctatgacaccgaagctatggccaccggtacgcccttcctgtttaccgatattaaacgggggaacgccttggcgattatggcggtcctgtacgtgataattgtggtggcggtagccggcaggcgcggcttcttggcgctactggggctgctggcctcgaccctggtgattgtgttttttatgctaccggcgctaatggctgggcaacctccgatgctggttaccttggcgggggtaggggcgataatgttcctatcggtctacctggcgcacgggattaccattcgcaccaccaccgcgctgctaggtaccatcttggggctggtagttacggttttattggcttacgcgggtacgcgagcggcgggacttaccggagctagcgatgaggatgcgttgattcttggcacccagctgccggctctagcactgccttccctgtttatgtgtggaatcgtagtggctggtttaggcgctctaaatgacgtgaccattacccaggcatcggcggtttgggaactcgatgaggctaatccccaaatgccgcggcgaaaactattttcccgggcaatgcggattggacgcgaccacattgcctctacggtgtatacgttggctttcgcctatgtaggaactgcgctgcctactttgattttggcgatgttatcgcagcgtcccttcttagaactgctcacggtctcccagatagccgaggaaatcgtgcgtaccctggtggcttccatcggattagtgctggcgatccccgcgactaccgtggtggggactttcctcgtaaaattcgtgcgggcttcctctgggtcagtcgcggatttacattcgtcttccgcgaaagattcacgagtgaaggagcaggtagagccgcagacgttaggtggggacgcaacaacggtagtgcgtacaggaggcggtcggcatgcccactaagctcggggaaattacggttgctactcctatcgctttggcgccgatggcgggagtaaccaacgcgccttttcgccggatttgccgggagcaagcagtccaagcgctcaaagatttagggattacctctactgatggcccggccagcgggctttatgtttgtgaaatgattaccgcccgcgccctggtggaaggcaactcccgcactctggatttgattaagccagacacggaagagacgtttcgttcggtgcagctacacggggtggatccggaaactatgtatcaaggcgcccggatgttggtgcgcgaaggtttggccgatcacctggatattaactttggctgtccggttccgaaagtgacccgtaaaggtgccggggcggctttgccttggaaaatagaacgctttgggcaaatagtggcggcagtggtagctggagcaaagaccggagaaaaagattctccgcgtgatcatcccgtgccggtgaccgcaaaaattcgtattggtatcgatgccgagcatgaaacctatcgcgatgctggcaaattggcgcagaaggtaggggcgagtgcggtggtgctacacggtcgcagcgccaatcaatactattccggcagcgccaactgggaggcgatcgcccagttgaaacaggatttagagattccagtgtgggggaatggggatattttttctgccgaggacgccttggcgatgctggagcaaaccggttgcgcgggagtggagatcggtcgcggatgccaggggagaccgtggcttttctatgacctggccagcgcgcttaacggttcggataaccgggctcgccccaacttgggacaggtatgcgaaatggcgttgcgacacacccagatgctgagctcctggatgggaaaccaggaacgggctttgcgggatatgcggaagcacctggggtggtattttcggggatttgcagtggggggagacttccgccgcgccctcaccagtgctaatagtttgcaagagttagagcaactgttttcgaccctagatcctgctttaccttaccctccggcagcggagggtaagcgtggccggaggggcaatccccgcaagacccacttaccggagggttggctagcaaccagagaggtagatgcggcagctgcccggattttggaagctgcaaagctggatacttctctagaccaaggcggctattagggggcgaaacccccgataaaggctagagtgaaatatatggaaaccgcgccctattctccccgtgaccgcgagcgcttcaaaacggagcccacgaaatcttcgcatcgcaccgattttgcccgggatcgggcgcggattatgtattcttcggcgctgaggcggctaggggcgaaaacccaggttttagggccggcgactgattcttttatccgcacccggcttactcattccatcgaagtttcgcaggtaggcaggtcgatcgcccaagaaatggggtgtgaccccgatatcgttgatgccgcttgccaagcccatgacctggggcatccacctttcgggcataatggggagcgggcactcgacgaagttgccaaagatattggcggttttgaggggaacgcccaaaccttccgcctgcttacccgcctcgagccgaaggttctcagcgcgacaggcagccctctggggctaaatctcacccgcgccactctagatgcggtttgtaaatatccttggctcaaaggggagggcgctaatagcgaatattcgcgcaaaaaatacaattgctaccgcgaagatgccgaagtttttaattggatgcgcaggttttcgcccccgcaccagcgctgtctagaagcgcaaatcatggatatttccgacgatattgcctattcggtgcacgatgtagaggacggtattcaaaccggggagctagacccggctaccttgggggagagcaaatctttagagttggtgtttaaaaccgcgactgaatggtacggagccgcgcagggtgacgaattagaagaggcctggaaacggatacataccctaccggggtggctatctagtttcgatggctcctatcgcgatatggcgcggctgaaaaatatgacttcccaactgatagggtgcttttgctcggcagtatcttccgctactttgcaggcggcaggaaccggtcccttgcatcgctacgatgcagatcttgttattccggatgctaccctcgccgaaattaagctcttaaaaggaatcgctgccgcctatatgatggcgccgcgagaaactgaacctatttatttagcgcaacgcaccactatctatgaactagccgatgctctctgggaacggccggatgagttggaagagccccatcttagcgcttggcgtcaggccactgacgatgacggcaggttgcgagccctagttgatcaaatcgcctctttgaccgacactagcgctaaccagtggcacgctcgcctctgtggcatgttccgttcagtttagtatctaaaatgaaataactgctatttaagaaactttagcgagcggtagcgtaaaaatattttgtaattactcggcgtggcttgctctgcccatttatagaaacggtgatcgctgcttagcaatcagcagctggaattcgtctagcctctgcaagcaagtgccgtaggcaataatttgtggacggttaatatctctaaacttcctctaggttcttgacaataccgcgggggggtgggggcagacttacaaagaatctctttattttttagcccctggaggaggagcaatggaagaaaagaaaaagaaacgctggccctggatagtaggcgctatcgtcctggtagtggcgattgcaggcttttttggcggcaataagggtgacagcggaaactcggctcaaaccgattcggctgcgcagactcaaaacagcaaggctgctgaaacaaaggaagatgagtcctactctctaggaaaagaattcaaagtcggagattggactgtcacagttgtttcggttgatgaaccggtatctgacgtgggtaaaaatgagtttgctgaaggagccaaagctcaggggcattttattccggttaaaatgaaagccaaaaatgatggctctaagtccgctactttttttgccgacagtgtgaagctaaaagatagtgatggtaaagagttttcctacagcagcgacgccgcaatttggggaactgagcagggtggaatgatcctagaagatgttaaccccggaaatacggttgagggagtgctttggtttgatactccaactgatgcaactatctcggaagttgttttcagtggcgggttgctagataagtctgtgagtgtccccgtcaaatagtaatagtttctaaagaattagattttgccttcgccgcgaaaagtcgcggcgaaggcattttatttttattgttatctttccgtactcaccactagcaactatcgttttcttaatggttaatactcagatagggagcgtcctcgttccgagtaatcagccaaatgtgaattggctcgactaagcacaaaaatcgatcggctatcaaatcgcctctttgaccgacactagcgctaaccagtggcacgctcgcctctgtggcatgctccgctcggtttaaaggctgataaaacttttcccgttttaagaagctgagatttaacattagggtgttgtctcaagtaatacgactaaaatagtttctttaccaagattaattagcgctttcttgattgcttctcagattagctttatccaccatttctaggagcggatctttcagcttttttctgatttatctttttctgattcatcatcgtccgatatcccgtgtgccagattatagagttctttccggggattatcagagagtattgccgctatataaggtatgagcaggtagaaaagggcatatagtatcccgccaatcataaaaactgttgtccagcgaatctcaatcaaaggaacaacaagtattgtggaagagtaattctcctcgaaatagtatgagattaagccgaagagaaagcctccccacccaggtagtcccacaaataggcctctcccggtgagcttgaggaagtccagcggtgtaagcggatattcctcatggtttttgttgaataggtttggtatacctgcagttggagaaggtttagagccgttatagggttgcggcgatccgtaaggttgcggggactggtatccctgcggaggctgcgggctttggaatggttggggaggttgataccctcccggcggctgcgggggttggtatccctgcggaggttgaggaggttgcggcgaaccgtagggttgcggaggctgataccctcccggcggttgcggaggctggtagggttgcggtggttgcgagccttgccacggttgggaaggctgtgcagggctgtaaggcgctttaggtgggtatggctggcgcggttgcgagccttgcggaggctgtgggctctggaatggttggggaggctgataccctcccggcggttgcggcggttggtatccctgtgggggctggggtggttgtgcagaattgttgggttgcgggggctggtatccccgtggcggctgcggaggtgtatttggaggaatcatcgttgatccttgctttctcgttaggaactgtggttagcaaaagtagggcgattagtgtttaaactagacgctgcttctaccgctagattactggggcattctcgtctttgggagccaaattaacatctgagttatgatacattttgccgaaaataatatcgactaaaaggtgatttaaagtaacaaagtattaaagtgtagcaccttgttaactggggtttcttttgtggaagatctaatgtttgctaaaaataaaatgaataaaataaattattttttgccccatttacccgtttttcttttatgcatactgaaagctatttcttaaatgaatctctgagatattagccaaaaatccacaagataagaagcaaccgtagatgcacccgcccgtcctcacctatgatgaagatatggcggggttaattcgacgtgaagatatcgatcaggtgcgtgagcgtgcccggattgatgaaatcgtgggggaacacgtagctttgcgtccggccggagtcggtgccctgaaagggctttgccccttccacgatgaacgcaccccctcatttcatgtgcgcccggctcagggatactatcactgcttcggatgtggtgagggcggagacgtaatcaagttcgttgagaacattcatcacctttcttttaccgaagcggtgcaatacctggcagataaaactggtgttaccttgcattatgaagaaagcgggggaggtagcaggaaagatcccaaccaggtttcgcgcgcgcgaattatggaagcaaaccgcaacgcagcgcagtttttccgctcccagctagggagcaaagagggagaggcggcacgtaattttttaagcgctcgcggattcgactccgatgcagccgccaagttttctttgggatatgcccccaattcctgggacgcgctgcttacttatctgcgaaaacgagggtttaccgaaccggagttagcagcgtcgggtctgttctcccgggggcaacgcggtccctatgaccggtttagagggcgactgatatggccaatatcgaacctgacgggagaagtagtaggttttggagcccgccggttatcggacgaagataaagggccaaaatacttaaacacccccgaaactgcggcttataagaaatcgcaggtactttacggtatcgagatggctaaaaaggcaatcagtaagcagcggcggatagtagtagtcgaaggctataccgatgtaatggccgcccatctatccggggtggaatgtgcagtcgctacttgcggaactgctttttccgccggacacgtgcagattgttcgtcgcctcctgggcgatagcgctgatccagcggccggggtcttgctttcttccggaaaagctcgcggtggggaagtaatatttactttcgatggcgatgcggccgggcaaaaggcggctctgcacgcttttggagaagaccaagcctttgcttctcaaactttcgtggcgattgagccttcgggcaaagacccctgcgatttgtggcaggcacaaggagccagcgcggtacgggcgctggtggattcacggcgtccgctttttgagtttgttttacgcactatcctaaaagctcacaacctggatacttccgaaggtcgagtgaccggtttacgagctgctgcccccgtagtgggacggattcgggatgtggcactgcgttcggaatatacccggcgtctggccggctgggtggggatgcctgaggacgaagtacgccagatagtgcaaaatacttcccgtatgcaatccagatctacctctgtcccaggaaatatcccctcagctagcccctacgcatccgcggcgcctggtcaaagcggaaactctgccgcgccgggcgcgcccgcggcaattactttgccggacagctccgatccggttgccaatctagagcagcaagccttggaatgcctattgcagctcccggccagccttttcggcctcggagttgagacggtttccccggcagcctttcgagttcctatgtttagcgccctcttttctgccatttccagcttgggaggattagacaaatacgcggagttgtggcgaggagccgaggatgaactggggagaaaagggaaacgtgcggtaatcctggcgaataaacgttgggttgaactactaaatgaacaggtagggcaacagttacaaagtttgctgtccgcgctggtggtttccccgctcccgcaagatgattccgcgcgtctaaatgattacgcgcggggagtttggggagcgatgattcgcggtgacatctcccgccaaatggcggagacacgggcgcgcctgcaaagatgcgaccctgaagatgagcagtatcaacagattttttctaaattaatgaacctagaaaatacccgccgtaacctgcaagaatccaaataagcaacaacttaggtacgcaatactaatttaagtaatagtgctattgctatttaaatttagggaatgctattttaattattagagcataaaaggttttctaccaggggttatgttcttctttttgtgggtgcgacatttgcaaatttatttccttttctttcagatattccttttgtagattgaaattgtcttaataagaaatcttcaaaggaggaactcaaatggcaatgccaggagtaaattgttcagctagtgattgtgcctttaacgacaatggttgcaacgcttacgcggtaaccatcgcaaaaggtggatgcgcaacctttatttctctggatgaaaagggcggccttgggaaagttaattcccaggttggtgcttgccagcttgcagattgcaagttcaacaaacacctgctctgccaagctgattccgttaaagttggcgccgatgaaaagtgcctgacctttgccactgcctaggtaatcagggcaggcaacaacaaagaacccggattcttacataaacagtaaggatcgcaggttaaaggggctgaggagtgatactactcctcagcccctttaactatctgtagtacctggaaggcagcgcgtagctgaggtgtttgcagacctgaagcttgcgggctaatggtgtcgatagctgcggatagacgagttagctatagcaattcggcgcgcagctgctccggggagagcggagaataccaggcgggaggcagatccaggacactggcggctccgcggtggccatgctcatgcagacgcaccaaagcgcgggcgctggcagtcaccatagagccggtgaaatcggggttggagtccagctgcagctggaaacgcgccaagtgtttgattccctcgcgggtatgtcccacccgaatcacttccccgccgtgcggcatacccgaatgatcacgcgccagttcctcagcggaaataaagttaacggtggtctcatagtctgcaaaatacttaggcatttgcttgatttcgcgggcaatcgcttctttatcggcgtcgggagcagccactacgtagcagagccgagtatgtttatctgccgtagttagctgaggattctcaccgctttcaaccgcgcgcatcgcctcttggttggggacagtgtattgcactgcgccctcaacaccctcaatgcggcgaatagcgtccgagtgaccctgggaaactccgcgtccccagaaagtctgggtgtagccgtccgggaggactgctccggtgagggcgcgggcaatcgagaataaaccgggatcccagccggtagaaatcagagcagaatgaccggctttcttggcggcggcatccatatccgcgaaataggcgggaatatcggcatgggtgtcaaaagaatctacggtattaaagtaggcgacggcggccgggccttgggtgcgcaaatcggtggcactgcctccacagcaaatacatacgtctactttcccctcaaaatcagccatttttgagagagaataaaccggagtgccggcagttttcagactctttggatcgcggcgggtaaacaccgctaccgcttccatatcgctggcggcattgactgctctttcgactgcccgccccaggttgccatatccgtttattgctacttttattgtcatagccagatattacaatctggggttggttccatgtaaaaactgcccaaaacctagacagtctagatcttgggcagctttaggggactatatctatgcacctaggggtaagttcgggtatttggactgccaggtttcgcgatagtaatcggccagctgtagtttgctggcggcagcgtcatctacaatcaccactacgtccaggtgatattgcaaaatcgaggcggggcaaaaagcgctgacagcgccctctaccgtaccgaccaccgcatcggctttctgctctccgaaagctaacaggatggcttggcgtgaacgcataatggttgccagaccctgagtaatggcgcggcggggaaccttgttctcgtcaccatcaaagaaacgagcattatcgataatagtgcgaggagccagggtaaccacattagtagggttgactaggcagccagagggctcattaaaaccgatgtgcccatcggcgccaatacctagaatctgcaggtcaacaccggaggtaatcgcttcttcatagcggcgcgccgactcttcaggatcgggggagaggccatccggggtctttaggtttgcgtccttgaggccggttttatcttcgcctaccagttcgcggcgaagcacattgcggtagcgttccgggtgatcaggggcgatccctacatattcatctagcgcccaaccggtgcagttctccaaagtgaaatctgtttctgcatgggctttgcgcagctgcgcgtaaagaccttcgggggtggagccagtggctagccccaaacgaaaccccggttttacctggggaataattagtttggcggccagctgggagccagcttccggagtgggggtaatcgcgattcgcatctaaatctcctttgctaggattttccgtcgttggttagcgaaagtcgttgctattttctcacgccaacgcgcgcttgtagctagggcgcgcgttaaacgcaaaaatgtttccccatgaaaataaataaatgcgggtggggaaaagttcccccacccgcatttggcttttattgtttagctaggaatccgccaataatcattggaaaatcctgctagaaaccgctgtttagcctggaaataccgagcttcgcggctagattttttgaggctcaagcatccatacttgattcgcgtagtcactgatggtgcgatcggcgctaaaacgtccggattcacaaatattgatccagcatttacgtgcccattccatctggtcagcgtagtccaaagccgcccggtcacgcactttacgatagtcggcgaaatcgcccagtacatagtagacgtcagccggttcatacccgttagaatccaaaagcgaacccaacaggtcatggaacagaccggtaccttcatcatccaaagtgccgtcaaccagcgcatccagagcccgtttaaggcccggcacggtttcatacaggtgccgaggatcgtaagtgcgccgcagctccggcagttcttcctctttcgccccgaaaatataggcgttctcttccccgaccgaatccacaatctcgacattggcaccgtctaaagtgcctaggcaaagcgccccgttcatcatgaacttcatattggaagtccccgaagcctctttaccggcagtagaaatctgttcgtgaatatcggcagccggaataatatgttccgccggggagacgttgtagttttcgacaaacaccacttggatgatcttcgaaacctcgggatctccggcaatcagttccccgatagtgttaatcaatttgatgatggccttagcgcgtacatacccgggagcggctttcgccccgaaaataaatacccgatgcggccacggtttttgcggattttctttgatccggaaatacaaatctaaaatataaagcgcgtttaacaactggcgtttatattcgtgcaaacgcttaatctgcacatcaaaaatcgccgcaggatcaatcttttctccggagcgttgctccagccatttggcaaaatcccgtttattatcggcctttacccccagcaactgcgccatcacatcggagtcatctaccaggtgccgcagagatttgagttcatccatatcggtaacccagtcggttgaccccagcttctcagtcagcaaactagccagacgggggttgcactgcttcagccagcgccggggagtgaccccattagtcttgttattaaacttttgcggccaaatctcgtaccagtctttcagagtctggcgcttaatgatctcggtatgcagggctgccaccccgttaatcgaaaacgctgcgtagcaggcaatccacgccatgtggatccgtccgccatgaatcggtgacatgtagtcgatgcgggcagcatcaaagccgagggcctctagctccatgcggaaacggcggtcaatttcggctacgatctccagaattcgcgggaatagccgctggaaaatggcgtattcccaggtttcgagggcttcggcaagaaccgtgtggttggtgtaggcaaaagtcttctgtacgatctgccaggcgctttcccaatccatctcgtgctcgtcaagcaagattcgcatcagttccggaattgccagtaccgggtgagtgtcatttagctgaatgcaattgtacttagcaaaatcatgcaggtcgtcgccgtgatgctgaatgtagttatctaccatgtcctgcagggatgcagatacaaagaagtattgttggcgcacccgcagcactttgccttcaaaagtagtgtcgttggggtagagcactcggcaaaggtccgcaacccgttcccgctcgataatcgcatcggtgaaacgctgagagttaaaagcctcgtagtcaaactcttcgatgggttctgacttccatagccgcaaattatttacgttatcggttccgtaaccggtaatcggcatgtcataggggaccgcccgcacttccatatccgcaaagtgcacaaagcggggttgttcctcgcggcgaataacgaaggggtagccttcttccatccagggatccggatgttcgcgctggctgccgtgctcaaaggattgtttgaaaagtccgtaacggtacaagataccgtacccgcgtaccggcaggttcatggtggcacaagaatccaagaaacaggctgctaggcgccccaggcctccgttaccgagggaggcgtcgtgttcagcctctagtacatcgctaaggttcatcccgaaggcgttagtagcctttttcgcttcctctaaaagctctaggttatctaggttgttgagcaaagctctgcccattagaaactctgccgagaagtaatgctcttggcgtccagccgcatacttgtcggtagtttcttcccagttatcagcgatacgctccacgatcgcttgtgacattcccgtccaaaactccatcggggtggaatcttcggcgcgacgtccagaaatagaacgggtaaatgaacctaaagaatgtgtaaggttgtctgccatattcaatctccttgcaaaactaccattccaggctatcgggtaaagataaaatgaccgacctaaaaccaggtttttggtagtggcattagttacacctgtttcatagggggtgtaaaaactgttgacctggtaatttcagggcataattaagtggtttataacatagaaactctagacttcaatccacaaagtttgccccggcgcgatttggttttttgccctatcatgcgaagccgagggagtgataatccccggggtagctaacacagtttttaccgtatcttccacagcttgcggcggcagcgggcggaagtccactcccaggtttgttacaaccaccacttggcggccgcctgccccggtaactcgcaaagccagtacctccgggtcgctttctagccagctagattcccccattcctagttcgaggtcgcgccggacagcaagcattttgcggtaaaagtttaagggggagtcggggtcagcttcctgagcctgtaccgataatgcgccccaatcatctggttgcggcagccaggcggggctggattccgcaggggaaaacccgaagttagagcctggatcattagaccaggggagcggtacccggcagccgtcgcgtcctcgtaccctaaaaccagaacgtttccaggtgggatcttgacgggcatcatcaggaagtttgctggcttctggtagccccagttcttccccgttatagaggtagatagagccgggtagacccgccaggaaggcggttgccgctagcgctcgggtcaaaccgatttcccgatctggttgtggatcgcttgccccaattccgttttcggtatttgcgcccgtcgggtaacccaaacgggtggagtggcgaaccttgtcgtggttagaaagtacccaggtgggaggggcgcctacggaggcagatgcctcttgggtacggcggattacttttcgcagggcggccggctcccaggggcagttaagtaccgaaaagttgaaggcctgcgacatctcgtcttcgcgcacatacatagcttcttgctccggagtattcacccaggcctcagccactaacatccggtcgcggccatattcatccagcaccgcgcgccattcgcgatagacgtcatggactctcggctggttaaagaagggaccgtcatcaggggcgtgaccactggtattatctgcgccctcaaaatgcaggcgatccggaccaacttcatcatcgggtagagcaggatcttttaccagggcatgcgcgacatcgactcggaaaccatctacgccgcggtctagccaaaaacgcaggaaggagcggaagaagtcgtggactttcggattttcccagttgaagtcaggttgggaggcgtcgaaaatatgtaggtaccaccagtcccggtcgctggctttgccgctcagaggctccactttcgaccaggccgatccgccgaacatagaaccccagttgttaggagcaccatcttcacacttgcggaacatgtacatatcgcgtgccggatcgcccggctcggcagctaacgcctgcttgaacaggggatgatcccaggaggagtgattagggaccaagtcgatgatggctttcattccccgggcatgcagctcagcgagaactttatcgaaagtttccaggtcgccgtactcggggttaatgtccaggtaatcagctacgtcatagccagtgtcatgttgcggagaaggataaaaaggagaaaaccacaccgcgtcgattcccagtttttccaggtaatcgattttttccaaaaccccagttagatcgccaatcccatctccgttggaatcggcaaaagaacggggataaatctggtagatagcggcgctgcgccaccactgattccagtcacatcgttgaacgcggctcatatacttctcctatgcagtcatctaaacagccttggttggaactcctggctggggatattttcctgtacttctgtaaaggtctaatcgttgaaattctatgaaattccctaacgcttagcgacttattcgcgccgctgtaagggcttaggcaatttctcttaaccaaaagctagttttgctagctcccttatttagcaggaacttcccggttatttaatgaagacgtatctagtcttcgctacctttacgacggcggcgacgtgcccgccgcggacgcggctggcgctgcgtccccgctccttggtgactatcgcgttcccggcgtcgatcacgtccgccacgggagcctttaccgcgcccagagcgaccacgagcattctgcctgcgaccagattgaccgcgtccccgcccacgaccgccggtttccccgagatcttctagtttttcagcggctaaaccggcacgtttacgcatagaaagcgggagccgcccgccggcgtcctcgggaatatctaagtcagtaaataggtgcgcactggtgtgataggtttccaccggctcctctttccccagggacagctctttgttaattagcttccaacgaggaacatcatcccagtccacaaaagtaattgcagttccggaatttccggcgcgaccggtacgtccgatgcggtgaatataggttttagcgtcttcggggcactgatagttaatcacgtgggtaacgtcatcaacatcaatgccacgggcagccacatcggtagctaccaacacatcgacttttccatgcctaaaagcccttagtgcctgttcgcgggccccttgcttcaggtcgccatgcagggaggcagatgcgaatccgcgtttctccagatcttcggctactcgggcggcggtacgtttagtgcgcgtgaaaataatgctgagaccgcgctcgcgcgcctgcagaatccgcgctaatacctcaattttattgagggcgtggcagcggtaaataacttgccgggtagtttttactgtcgccccctggtcgtcgggatcctgcgcccgaatatgggtggggtgcgacatgtaacgcctggctaaagccactacttcgccgggcatagtggctgaaaatagcatggtgtggcgatttgccggggtgcgcgaaagtagcacctctacatcggggaggaagcccaggtcaagcatttcatctgcttcgtccagcaccatagtgcgtactgaggacaaactcagatgcccctgtttcatgaggtcaatcaggcgaccgggggtaccgaccacaatttcgactccccgctttaggtcagcaatctggggttcgaaggcacgtccaccgtagatttcgcaaatacgcacgctgcggtgcgcggctgcctgcgcggtttcccgcgccacctggatagccagctctctggtgggcaacacgattagggcttgcggatgaccaggatctagtagctcgtcgaagccatcctcacccggaccaatcacgttctcaagtgctggcagagcaaaccccagggttttgccggtgccggtcttagcttgcccgataatatcgtggcgctccagggccaccggtaaagtcagtgcctggatcgggaaggggtgaacgattcccccatcttcaagagcctgacaaagcggagccgaaaccccaaaatcagcaaaggttttttcagaaagatccatggaggattcgcccaccacgtcggcctccgcctgctcaatctgaggctcgtgtgccgcggatgtatcggcaattccactggttgcttggatattttcttcagttgtcaatcgaatacctttcacggggagttgtcccctggaactatggaggtagccgatcgtgaaaaatcttgggtctccgctgaggagaccgaggcgaggcgcccggaaaaaatacttcgtttacaaaaacgatcggtcaacccgttgtcttccctttcatcctaacctaagtgtgcacgcggcaaacaatgggggtaatgcagcttacatcttgttgaaaggctggtatttttactgcaggtcccgctataccctctcaaaagcgagaatcgaacctcccggcgggttaatctaaaagggtgagtgacgcacaaagactaggacttattggatacttcaccttggcgatgcaacagcgcctggcgaaagatgcttcgctgtgccccacggtagatcaagaaatcgctttagggcagatgtcggcacgggcgtggagcaactaccaaaaagtagcgcagatcagtgaaaacattggtgttgatctgccgcaagagatgaaacagtatatgggcctgaccgtccagctagaggagcgtttgcgtcctactgactggtatgaacgtctggttaagagctacgtcactattggggcgatggcggactttaaccgcagcttgaccgggggcctgtccccacagctgcaggcggagctggccgaggttccttgggattgcgggcaggaagaatgggcggtaccagtcattactcaggcgtgcgccacccaggccaccgttccggcgaggctttctttatggggtaggcgagtactcggagatgtgcggtctactatgcgtcaggcagttttggggtacccggaactaattggtgaggacgcgcaagatattccagaagaaatcaaggatcatcaccgcgcgcgtatggaacgcactggcctaaaagcctagcgctaaggtttgccctcaggtagtaaagtccttacccgcggcctccaaaatcgagattccgggcctacaggggttattagtagggctgacggggttacccgattccaaatcccacgcgctgcggctgggactcgcttatctgacagtaggcgattactcgcgggttgatcaggatctgttgtccttgcttattggtgagcgagagcaactcttcgggtttatctaaagctgcctgcagggtagctttgatctgttcagcttccattgctacttccagatccaaagttttggccacacctttaagccccagtgagatattcacatttccctccgtttatctatttactagccttatcctacctgctcgctgccgagctttgtccgcttgcttgctaatagcaaaaacggctgtcttttccggtaataccactggtttcgctctggtcgagaaggaaaacggcaaatgcctgcaggtaatggggttggattcttacaatagtctttatggctactttgaaactgcgatacgcttcttctccacctgaactggaattacctgacattactggtgagggcgcgaaaatcctttctcgcctgcaaaacggtgaatctttggtggtaaacggggtagcaggtagcggtaaaactactttggcgctcgcagccatgcagctgctgcatgatcaggacaatgaggtcatgggaatcaccccttcgcgggtaagagcagattatttaaataccgcgacgacgatccgccatctccccatagctcgtccgtttattacccccaccgccttggctttccgggtgctgaaacagtttgccagcaatcggcgccaacagcttccggaaccggaaatgctaacgggttctcaagaagaggaacgaatccaggaacttttagagcaggttcaagacgtagagtggccagattacatcagccccgaggtgaggcaaacagactattttcgttctgaactgcgcatactttttgccacctgcgcccaatggggaataagtgctcaggatctggatgccctaggtagtgagcaccaggttccagaatggcgcgctgccgcagctctgcttagccattatgaaccttcctttaccgataaccgctgggatgtttctcggatgcaagatcgtgcgggtcaggtgttgggagagtggggcgaagacgctgccttgctctcaccaccgcatctcccagattggttaatcgttgatgacctgcaagattgcccggcttctaccgtgaggcttttgcttaagatggctgaggaaggaacaaaaatatttgccctctacaacccgcaagtagcggtagaaaccttccgcggcgggtatccgcaaggtgctgaggatctagtaagagagctaggctgcgcgcagagcaccctaagaaattctttccgcgaaacttcaggaggtctggaacttttagacccgttagggaaagaaaccgatatagacagtgagcgccaacaaaaatttgcaattttttccagcttgtcgtctcaggcgcacaccatcgcggagtatcttcggtatcggcatctaaaagaaggcattgcctggaaagacatggcgattattgcccgtaaccgcgcgcaactagatgaaatagcgtcgatgctgcaaggacaagaaatcccaactttcgaaggcgacagatcccctctgttcagagataaccccataacagcttcgctactttctatttttaatctacctggacaaagcgaattggctacctatcgggcaagtttagacgcggcgcagctaggcgacgaagatggggaaaactcctggtcgcccagtgaatatctattagatgaaaagctagcctcccttcggggaaagacggttcgacgtctgctgctttctgcgttgtttggcatcgattctttgcaacttgtccgcctagaacgctcgctggttacggcgggggtcgcgttagataccaaaatcggagagttttacagttccatcggcacccctcgttttcccttaacccaggtagagatgatagcgggaggacagatttatatcctttgccaccgggttctaaccaccggggtttcctgtttatcgcttcctcccttacaagctttagagaagatctggatactacttgatttgcaagaaagatggcgtgatcgggctctaaacggggaagacttcgctgataacgctttagatgtggtaacccttcttgtgggacacgcacagctttggtcgcgccgtcacctcaacaaagatatgcatacctattgcagagcgctcgctaatcagatgcaaccagaagatgtgaataccggaaagcgggggcgccgtccggcggtagctttagaaaccgtgttttcagcggcgggacgcacttgggatacctgcgtagttatcggaatgcaggacgggcaatggccggtgctttccgagcggggatcgatgttgcgctccggggagatttctgacctcctccatgcgaatgctttacttagcccgagtggaaagctgcagatagttccgggggaatctcgtagtcgtgccctcgagatagagcgttccttagccaggtgtgcgcttagtcgtgcccgtaagaatatgctggttaccgcccgcttagcttcggaggaagcgccttcggtatttttcgacaatctttgtacacgaatagaaaaagggaattttgaggctgcccggtatctgggcagtgattgggatcagctcgcagagtctgcttctgaacttaccggtgaaaactccctgcaggaagaactctttccctctctgcgttctctggtggggcacctgcgagcagtgctagccagagaaacggatgaagaacgtcgccagcaggcgctggagactttagcgtatctaagttcccagggagtccggtttgctaacccggatacttggcggcaagtgggcagagataaaacctggtggacgaatcccgcaggattgaaacctgcaggtaggagggtaggaatctcgccctctggcttagaacagctgaacagatgtgaacttcgctggctactaggtaagaggggcggcgaagcggtgaatgcgaccggcggtcttgcctggggaacgctagtacataccatcgcggaaaaaatgaccgatagtactttagaagaacgcttaaagtacttttatgagaactggccacaagatacacagtcgttcttctctcgcaaagcgcaaaaggaaaaggaaaaaatggtggagcgcctcagccactatttagatgatcatcaaacggtggcgataaccgagctaagttcttatatcttcgtacaggatgcggcggtgcttgctgcccggatagatcgcttagaacctggtgaggagggaatcaggattattgatttcaaaacaggtactgggactcccacaaaaaaagaggtgcctaaacatttgcagctggcctgctaccagttagtgctggaagcaatcctggcgggggaggataaagaagcagctgaaaagatagggccgctattggcggagacggaagctaaaattcaaaacgccagtttagttttcgtgtccaagcctgaaggaaaaaataaaccggacgttcccaaagtgttttcccagtatcccctaactaatgaaacgaaatcggaagtaacagacaatatcctgcaggcggcacaggtagtttcgggagcagaatttaaggcgatagagaacggcaaatgtcgtagctgttccctgcgttcttgttgcccgctaatgaatgagggagaacaagtgctatgagtaacggtcagaaaattaagtattctccagcgcggattgccgacgcaatagggcaatatagccctaacgcagatcaggaaaaagtcattactgcacccattgatcagccgatgatggcgattgcgggggcaggagccgggaaaactgccactatggcgtttcgagtagtgtacttggtggcaaacgggctggtggctccagatcgggtgctggggctgacgttttcggtgaaagcggatcgggagctggccagccgcctaagtaactatctgcaggctttagcggataaccctgattttccggaggtggcggaatatctcactgacagtgaaactggggggctgatcctacccgaaactgcaacctataacgcttttgctaaccagattgtgcatcaatacggctctcgcttgggagtttccccgaattgtgtgctcctagatgaagcgcgacgctggcagactatgtatgaaattgtcagcaactggcctgacgagctcagcaccgataatgctctttccaaagtggtggagagggcgctaggcataggttcccagctgcgcgatcagctggtagatgtcgagtggttgcgcgctaagttatcgcagatgcaggagctatatggcgcggaccgaactggcgaagacgataattccaatgccacgattagagactttgtgaagtctatgaagcttaggggcgaattactaaatatctgtgccgagtacgaaaaatataagaaacaaaatggatacatagaatatgcagatcagatctattacgcggcggagctagttgaaaagttctccgatattcgagcccagcttagtgagcgctatgacgtaattttattggatgagttccaagacacttccgtggcgcagctaaaactattttctagaattttcactggcaaaggagcaatggcggtcggtgaccccaaccaggcaatttatggatggcggggagcctccgagctttccatgcgagatttcttaaccgaattcggagtttcgcccggagacgctgaaggacacgttcaagatatgccggttacctaccgtaaccgggagaatattttaaaggttgcaaaccagatagtgcagccaatcaggaacttggcggaggggcacagcgcggcggaagtggaagcccaggtgcgcgaacagcttgagtccccaaaggtcgattacggttcaggcccggctccctctccgtcagcttttgctgcccctgctgcctctgtcaaagcaaaagagctggttacctgcgaccaaaagggggacgatcccgggaaagttcatttttattttgtggaagattctgagcaggaagcgaaacgaatcgctgatttttttgcggaacggtgggagcagcgggagcaaataatcgcccggaatgagcagttagcaccagaagaccaagagaagcttcctaccggagcaattttggtgcggaagcattcccaaaaaccactgattatccaggaattacgcaaacgcggactcccggtagagatcactggggtggcgggactgatctacgacccggcagttgccgatgtaatcgcggcactgcaggtgtcggcggatgccggacggggagattccttgatgcgcctaattaccgggtgtggcattagcccggcggacattgatcttctgtggcgctgggcgcggcatttggctaacccggaggataacccggatattaatccgcaagcttatttaatggacgccctcgataacctgcccgagccgggctggaaacctcaaggaacagctagcggcttcagtgcggaagcctaccgccgcctaaatattttgcgctcccaactagctaagctgcgtcgccatatccatgacccgctaggatccctggtacaatgcactatttttaccttacgtctggacttagatgttaaggcccgtccggcgggggagctttctgcccgctgtctggaaactttcgtaagagttgcccgtgagtaccagtccaccggagtgagcgaaaacctaatcagtttcttagactggctgaaacttgccgataaagaggggggcggcctggatatgcccctggaggaaccagatccggatgctattcaactgatgactattcacgcagcaaagggcttggaatggacttgggtggcagtaccgggcctagatgaacttcgcagtgggggaggcactctccctgaccatgcgatctctgctagcaaaggcatatgctcggatactgcctggatcagtgatatcgggatgcttccctatgatttgcgcagtgatcgagaagtgcttcccactattgaacgcgggctggaagcaacgggatatgacttcgaagccaatacttttgccgataacgcgaaagttattgggaattaccaggcagccctggggttccattcgcaacttgctgaccgacgtctagcctacgtggcctttacccgtgccgagtccgaacttttagttggaggcagcgagcactcggggacaagtaagagtacccgggtaccctcccagttcctggcggagatagattccactggggaaatgcgtaaactgcgtaaccaggagccggtaaaaaatgacggatgggagcctaaggttcgtgacctgccttggccgggtaacccttctaacgagctagcgcgactttctgcggcggcaggtgaacttagtgaactgattgataatatccattccaagcctttcttacagcggttgttagccacttccgacgaaaaagggacactgcaaatggcgggcttccattcctcttggttacagcaggcggtgcagctgattcgcgaccagaaggctgaacaactatctcccaatgaggtggagataccgatttcaatcgctgtcaccaaggcgcgtttactacaggaagaccccgaaggtttcgcttcagatcagcggaggcctattccgcagtttcccaatgagggaagcaatttgggaactctattccacgaatgggttgatcaggagcttcgaggtagagagtatccgctgcctagggaaatagaaaaagatacgctcggaaaactgcaagatttacagaagaaatggaaaactgggaagttacatccagataagggctgggagtatgtagattccgaagtggaatttgccgctccgatggatgataacaagctggtggcgcgaatcgacgcgattatgcgcaaccccaagaccggcaagctcaccattattgactggaaaactgattctttgaaactggatagctcaggcagagtgagtggcaacagtaacgaagtagttgcaaagtatctacagcaaatcaatacctatcgtctggtctatgcgttttctaaagggatacgactggaagatatcgacgccgcactatattttgtgcgctacgatttgctgtgtcctctagatgagtgtcgcgagcaggtgcaccttccgcaaaaactagaggaactctttccctacctagtttaatttcggagtttcccgggcatttatatagggaaagccgcgctggttttcccgcgtgaataacgcaacccttaattactggggtctacttgcgcgtcctcacaatcggtcgagggagtatcgccgtcggttgttggaccatcttcgggggctagttccgcggtgctttcaccaggttcaggggagttatccgtgcttgattcagccagcttatccgcattcttggaggcaaaatcctcgcggagggcgggcagcagcccagtgctatccaaagtgtcagccaattgcgcaatcaactcgcgggcatcggcaatgatttcttcgttgttttctcgtaccccatgtagcagccactccagcagcaccagttcagagttgagttcgattcgcgcgtttaatttggggtcttcacttagccgcagcttgcggtaggtatccagtacccccttagcgaactcatcggaagaggaggaaactacccaggccaggtcgcgggcagggtcaccgaattgggcatcgccaaacccggtgataccggtaatcgcctcgtcctctgtatataggtatggctcttgtaaatctgcgtggataaaagccggcgaaaaacgccacaaagaaacatcctcgaggcgttcctcccagcgctgccacaggcgcggcggaatggcgcgggtaggtgcactctcatccaaaaggcttagccaacggcggcgaatctgatccgcgctaaatgcggggcgatcagcggcttgtagaatccgcacgggcagatcatgcaaagaagccaaggcactccctaaagattccgcgagtttgtcggagacggttaaatcttcttggctcaacggtctgcccgggaaggccacatgaactagggcgtgctttcctcctacaatccgcaccgagtgcgccggccaggggagggcaaaaggtaaacacgctccgtcatgggtgagcgcctgcattatccggctttggatttgcagttcttcgtctcggtgctgggtgcgggggcagttgactagccatttgcgtccagctgcgtctttcactgcgcatacgcgcaagtcttcggtttcaaaacgcggcgagcaaagcgatacaaagtcgttatcgggcatcgcagcagccgccatcgcggctaggggaagaaaatcgtccgtgtcattcacggttttaggttatcaagtagggcgcgtttccgggttcaagtagtagaaatagtctggcttccgtgctgttttcttaagagatactaggttgctcactgccggcggtggtttatgactagctattagcggctacgcgacaaagctggcgcggtttatgtgggttagggcactaaaagatttgaagtgatgaaaaagttattaaatgacagacataaaacgggtgtttcggggcctaaaacccttaaaatacccaatacttaccacctgttaagtattggggtaatacttcacctaaaatctttaaagtgcacatctgcgctggtaaacacatttttatgaaaacttacctactttccacccaataagcttttacaaaatgtgacgtagatcacgcataaattaggcttattagcttgctttcatttgaccgagtggtaacattaataccaacaagaaagaattcaggtcatgagggagactgaaatgaacaagggaacttcgatcaagaagatggctgcttgcgggatcgctgccgcggctttgattcctgctggcgtgctcaccgcacaggctgccgaagggctgtccaacgacggtgtgcagacctccgttcagattcaggctcgcacgaccgaggttagcggaaacctagccgctaacgatgtagatgcttcggcttatgcggccaacaatctctccgcgattgaccgcatgggcggcgccggctcccttgccggaatcgttatcttgggtggtatcggcgcggccggtgctatcagccttacacgttccttcatgatcgggtagatcctcttactacctgataaaaaccccgggcacccctcaactgcccggggttttttgtacccttttttgctgcctggaaaaagcaagtcaagaccgggggaaggcgctgataatataaaagcaaaaaaaggactatcaatgtcttcttctcagttagatccatttgcgccggtaggggtgaagttccggccagtttctttggagcttataaaggtgcgcctggcagcagtggcatttttcttgctgtgctcagctgcagtggcgattattttatttttcttacttccgcaaaagtggattggtctgctgttaatcgcggtggtggtggcaattgcgctgtggctgctgtggctgattccgcggcaagtgcgcgctatggggtgggcagttaccggaactgacctgcagattcgcaagggaataatgtttaaatccctaaccgtggtgcctctgggcaggctgcaatatgtagacgttgaagaaggcccgattgcccgtcattttggaattgcgcaggtaaaactgcatactgcttccgcatcgacggacgcagagttgccgggcattccccgcgagcaagccgcccagctgcgcgaacaaatcgcagatttagctgaaagtaacctcgagggaatttaaatgggcgatcagaacctgaactttgaagtcccaaaatcaccgccagtatccgcagatttttccgctcctattctggggggaggccaatcgctagcagaaactaccggtgttggcgctatcgatactaggaagaaaaactccacctggcggcgagtgcattggttgaccccactactgcaagtctggcaggcgctggtaattatcgtggtggtggcactaacccaatcgctaaataacctgattatgttggttcgcaacctccgggaaaacttgccagggcatcccgcactattattgctggtgatagtggtgccgctggcgattttcttcctgctcggcctctacctttattttgcctggcgagcgacctcctggaaaataaccgctgaggacgtgcaatatcggcggggtattttctttaagaaacaccgcaagattcccctagatcgggtacagtccgtggacgtgtaccgtcccttcttggcccggctttgtggcgtgggggagctgcgaatcgagtcggcagggggcagtggatctcgggtgcaaatccagttcctagccaataagtatttagatggtgcgcgccgggaagtagtagcccgtatcgccggacggcagagcgccgaaccgcagatactgggggagcgttcaaagggcatagctggaaccgagctgtttgcggaggacgattaccatctagaccgcgatgagtatgaagtttatcgggtttcaccaggtcgtttgatcgcctccgtgctgttgacttcgcaaacggtctggttgctgataatggcgctgattgtggcgattggcgctatcgtagtgttcatcatggcggatctaactgtgcaggggttagtcgcgggaagccttatccccaccattatttccattggaattattcccctgatgatactgtcttatgcctggtcacgttttaactccggtttcaatttcagcgccaatatcactcacgatgggattcggattacttcgggtctgctcgctctaaaatcccagaccttgccgcccggacgtattcatgccatccggtttatccaaccgctactgtggagacctttcggctggtggcaagcagaagttaccctcgccgggcatggggtggaaaccagcggtaaccaaaagaaacaagctgccgacaatctacttttgccagtgggaaccttggaacaggcaaaagttattttgcagatggcgatccgagatttaggggccagtgagggcgcagcagccgacaggctactgcaggcggcttttaacggcaagaactcaggttcggaatcgaaagttatattcactccttgcagcgaaaaagccaagattctagatccccttgcgcgctttcgtcgcgcctttgctgccaccgcgaccgtgcttatctaccgtgacgggtggctgcggcgcaaagttaccttcgcaccccacgaacgcgcccaatcggttactaccagcgccggtcccctccagcgaagcctaggactggcgggtgtgcgcctagatttagtacccggtaccgcccagatgaaagttccacacctagatgcaacgctggcagctcaacttgctgaacatgaactggcggtctcaaaaatacgttcccaagtggagccgaatgcccagtgggcagagcgtatgctacaaaccctccgccctaccggacaataattgcgacgtgcttgcgtgcggggctggctcgataaaagtactccagggaaccccatttttctcgcttcagcgtgaatggagattgataacaggaggctaaaaagcgtgtttccgactaaaaaagatggtgacaacgcgtgtgcctctgacctgaatcaggcggtgaacgcgcaaaacttaggcatacccggattcttccgcgcagtatttcaaatgggtaacaacatgcattgtcagaacttcaacacaaggttatgattacagggtgaaagatagctggcgggtgctgactcgtgatgtaaagcggattttttcggttccgcgatcgctgattatcatcatcggtatcttggtcactccagccctatacacttggctaaatattttggccttttggaacccctataacgcgacagaaaacctgcccatagcagtagtgaataacgatgtggggacggaatccgcactgactggtgagctcaatgttggcgacttggtagtcgacaaattatcagataataagcagctcggctggcagtttacagatcaagccacagccaatcacaaaatcagaaccggggaagtttatgcgacttttgtcatccccaagacctttagtaaagacttagttgatattttcagtggcaaactcgatcagccgaccatcgaatacaacgtgaatgaaaagaaaggcgctattgcgccaaaaattactgatgtgggagcaaatgaactcgatattcaaatcacgtcaactttccggggtcaggttggagaagccattgcgcaggctttacgcgacggtgccttagagattgacgctaatgttgttggtgctcagggcagcgctttagatgctttgagcggtattaaccgggatctgaccgatgcgcaaggcaccttggattccgccagtgcatctttgacgggttccttacagactatgaaaaaagtccgggctacgctggctgcagctgacccggcattggctgatgtttccgcggctttgagcgatgcgcaagacattttaaggacggtcgtctctgatgcttccgaatttgctgcaatggcggggcaagccagtattaacgcccaaaaagcactcaatgaatcctcggcggcggcagattcggcggtgtcaaatgcgacaaataaactcaccgaaatagactcacagctggaatccggcattaaacgggcgaatacttcgatagaaaaaatgcgggatcagattgcggttttggaaggattcccgcaaacacaaaagctcgctgcggagttgaaaacccagctgaacgagatgcaggacctgctcaacaagatcgggaaaactgggtcagatgcggcaaaggctagccaggatttgcaggcactgatgaaatcctttgatcaggctctgaccaacgcgcaacaggctgccactaatctgcgcgaacagtctactcgaaccgcatctcagttaaatgcccaggtaacgcagctttcggcgcagctgggagccatcaaatctgcggtgagtaccgcgcggatttcccttaaggaaatttcggcgctgacccacggaatcgatgatcagattgtagacacacaaaatgtgcttgatcaggtgcagagcaatctcaacgcgctgtccaatataaccagcggagctcaaaccgatgtggcaactctcgctaccgcgctccggacggggagcttgaaaacaatcattgggttggatccgaccaatatcggacgttacctgacctcaccagtaaagttcgaccaacagacgctttttcccatcaactcttatggttcgggaatggctgccatgttcatcaatctctccctgtggattggtgcgcttatcctggtcattattttccgagtagaagtcgataaagaaggctttgactggttgagtttgcgctcggcttatctggggcgattcatgctctccggggtgctttctatagggcaggggttgatagtcagcgtgggcagtttgctgctgggagtgcaggcggcaaatgttcccgctttcatcgctacttccatgctgatcggaccgtgttatttggcaattatctatgccttggcagccgcattcagtcacgtggggcgcgccctggcaatattgctggtggtgttgcagattcccggtgcctcgggtatctatccgattgaactcatgcccagatttttccgccagctttccccggtgctcccgttttcttacggcatcgacgcgatccgagaaactatcggtgggttctatcacgggcgtttctggcatgttatgacggttttattgcttatgagcgtcgctgtgttccttctggggtttgtggggagacgtcgtttcggttacttcacccagctgttctatgatgatttggctcgcactgaactggtcgtgaatgaagacgttcagctgcaaagtcgcggttaccgcttgagcaacatcattgcgctgctggcgaaccggaaagaattttccacccgtatccggcaacgtcaagaagaattcaatgcccgctatcacgctttgattaatggagtgagcagcgtggggattttgggactggttgtactcgggatgatttcctggctcacctccgccagtaagccactgctcctggggatactagcgatttggggagtggccatcatggggactctggttggcgtagtggtactaaagagttccatcgaacgagccgagagcttatcatatctgacggaagatgaacttttcgagagcctagctcgccagcgagaaacgaatgttgctaaaaccgaaaatcgatcggagagccaaagcagcggagattaccgcagccgcagtaaacgtcacctcattagcgcgtctgtgcgggcagacgctgtggatgaaagtactgagaagccggctggcgaaaccgatgcctccgcaactagcgaggagccccgatgaacgaagtacttttcatcatccgagacgatttccgtcagattcgcggcagtatcatggttcggatttccatggttctgttgattgccgtgcccttgttcttcacctggttcaacgtgctggcgacctgggatcccttctcaaattcgggacggctgaagattgccgtggctaacaccgatgagggttacaccagtaaaatactgaacgtcaaagtcaatgtggggaatacggtgctaaaggaactggcagtaaatgaccagtttgattgggtaataaccagcaaagataaggctttggagggtgcgcgttcgggggaatattacgcgacaattgtgttaccaccggatttttcacggtccatgtttaccttctatgccggcggagctgccccggcaaatatcacgctgcacaccaatgaaaaaaagaacccgctttcagctaatctcactacgcaaggcgctcagggggtcaccgcgcaaatcaacacgactttttcgcgaaccttggcagaagtggccgtaggtattgctgaggacgtgtcctcttatatagacactgctgacactcaggcagctctggatcggctgagtaaccacctcgaaaccctatctgcggaactgaattccggggcgaataccgttagtgctctgtcaactttgataggttcggcggtgccgctagccaccggagcaaaacagttggctgcgggggtacaggactccttcgagggggctgttgactccacatttgattccagaggaaaaggcgccgccggaacaaccaatcccttcacatccgtctcttctcggctcgatgatgctgtgcgactggctgaaaacaatatttccgacctgcaaaagcagttagacaaattgctgaattcggtcaatagcgccagccaaagcagtgcggacacagtcgaacagcttaagaccttgttggataagcaaaacgctggcttccaacagacgcgggacgcgctcgagcgtgctctggggtcggaaggggcggatttagtagggaaggatccggctgtcgaccgattcttggccgagatggatgcggcgattgctcgtcaacaaatcctggcggagcgactgggaagtattgcggctgacctgcgcaggggagtaactgtagattctgacctgagaaagaaagcccgccaagccatagcagatgcgcaaaaagctattgacaccgctcggtccaattttgagaaaaacttacagccaaagattgaaggtctgcgtaaaaatctggattctgccggagaaaatgtgaaggttttccgttcctatctgcagcaggtgcaagccgatctttcggacagtgcgggcgggatgattgcgagtatgcgtcgctcccaaaaaaccctggacaataccgcaaaacggatgcgtgacggagcccgccgcttgaatcaggctcgggaacagatttcgtctgcccaggcgaaaggggacttgaaaaaaatcgccaccacgctgggagctgaccccaaagattttgcccgcctaatttcttcccccatagcggtaaaacgcaatgcggtgttccccgtagccacctttggggtggggatgactccgctattcaccgttatagccctgtgggttggggcgctgctggcgggggttttcctgcgcactgacgtttctgagaatgtggctaaacgctacctggccagcaggggagcccggaaagatcctgacgcagctactggtgcggatgcgaatgcggaggaatcttcccggttggaaggggcggaaacggaacctagcgaaacagtatcgactccatccgcagaaaaaaagcctatatttaccggggctcaagagtacctgggccgttaccttatgttctgggtaattgggatggcgcaatccacattgctgatggtcgggctaattgtgtttgtggagattgaaccagcccatcccttcctgctgattttggcaggctgggttatttccactgtgtttaccgttattgtttatacactcgtcgtggcacttgctaatgcgggtaaagccttagcagtgctgttgctggtgttacagatttctgctgctggcggagcctatccgttggaactgctaccgcaatggttccaaaacatcagtccctggctgcccgccacctatgcgattaacttgatgcgttcggctatcgccgggatttacgcaggggattttgcctataacctggtgataatcctgctattcctgattccgaacctggtgctcggactggttttacggcgtacgatagccgggcggatccacgatatggctaaagaggttgaaaaaacgaaagtcatgtagccaaagtggagtgagcgaggaggctaggtttttccccgcccctacttgaacgggaggaaaaacccagcctcccgtgcctagccctcgccagccccgcactaacttgcaatcagttacgcaggttttctttggcttggcgggtgcgctggtcgaaatcttctacgctgttgttggaatccccacctaagggggaagacaccagcgggactttcttgaaagtcagtgccggatcgtagggcatggggcgctgacctttacggcgtgccgctgcgatgaagctgactatccaggaaatcactgtccagattgccaaaactattagcgctttgcctaagtgcagttccccgccggcaatggccgcgcgaatagtgcgcgccacatgggtcatggggaagagcgggctgaggaactggaagaacttaggggcagtttctaccgggaaagtagccccagtggaagtgatttgcaagcacagcaagattactgaaagggcgcgcccgcggtatccgagagcagccacgcaagcctggtttaccgccacgtatccgatagaagctaatactgctatcaagattaaggctccgaagttttgggcatctagcttcaggaatagctgcaggccggtcactactgtgattgcttgcagtgcgccaaagagcgccccgatagacatggaacggaaaccacagcgccagaaactttcttccgggcggcgccgcaaatctagggcggggaaaatcaggaagatggcgatcccgccgatccataaacacagagccataaagaagggcgcgaatccggcaccgttatcatgcactgggttttctcgtaccgattttacgtctgccaccccgctcgcggctttagagactttttctgcctgtccccggtcaacggtgggaacctgctgggcgccatcgcgcagcccttcttccaagctagaggccccttcggtcagcttaccgattccgccagaaagttgttttccgccctcggaggctttacccgcaccccgggaaagagaatcgaggccgccgctgagagcattagcccccgtgcgtaactgtccggaattcttatctagggtagaggctccggcagaaagtttctgaaccccccgttgtgcctggtctaatccgttcgccaaggcataagtgccatcttttagagtcggtttttgctttccggcttgagcctgtggggtaagggcggtttgccgactaagttccttaactccttgatctgctgcgttcagcttcgccttcatttcttgtggatcagcctgggaaagtttgtccgcgatcgtcagcaggccttgacccttggtgatattttcggacagctgctgcagggtgatgccctgtttgttcgctagttcagtaagcaactggcagtgggggaatgacggaagtgccgccgggggcacctgggcgcatttgtccgctgcttgtttaagttcgttcaacaattggttgattttggcggtatcgatgtcggcttgcgaaagtggggctaaaagatccaccaagtcatttccgcttttagctagtttactaacttcgggttgcatggcagctacctgctggtgaatctggtcgacaccgccatctacttgcttggcaccagcagctagtttcggcatattgctatttagctgccccagaccggaattgaggctggaaaccccaccggtataggcggtgattccatcccgcagcttcagggcgccattgcggattttaacactgccatcagcgagatctcccaatcccaccactagcgtgtcggccccagtacctaactgttctccccctgcggccagttggtcagctcccgaggccgcatctagaaatccctcttttagcggaccggtcgacagtaaaagttgatcaatatatccggcagcgccctcatgagataaagcggcctgcagtgctaaagcagcggaagttgccatcgttccctgcagatagttcaccgcgtcatcggtgcgcagttctagctgagctttcttgcctggaacctgtgactgggggtcggcgagtttcgcgtaagagctggatagattattgggaatcagcaatagggctttataggttccgtcttctagacctgatttagcctgggggagggaagctttagtccagtcgaagccgggggcatcatccttatagagttctttttccagactttcccccagattaagggttttttcgccatttgcactggtggcggtagctggctgatctaggttcaccaccgctgcttttaggacgttaacccgttgcatcggatcttcatacgcccaggtaaacaggccggaatacattaacggaatcaccaggataccgagaattactatcacgttggaaagagtgttccaacggtatttcttctccatcgtgcctccgaaatttctagacttatatcttttactaaacggttacgatacaccagtgtatccagcggcgttaattgccggtagaatcttttttcttatagtaaacaagctgccagcgacaatccccggagatagggcgaaactcactatcggagcgtgccgtatccacctgccaaagctgcggacgaatctggggagcgtgggcgtagtcgggctggtcacccacatctaaatccagataggtaaccaccagttcatcagctaccttcattccttcttgatacaggcgcgccccgccagtaatccaacattttgctgccccggaatcctcggctagctgcagagcccctgaaaacgaggaagctacctgtacgccctcggccgggtagccctcctgagaagttaaaacgatatttaaccggccgggtaaaggctgtttccctaaggcttcaaaggagcggcgccccataataatcgggctacccatagtagtggctttgaaatgcttaaaatcagcgggaacatgccacagcatgccctggccatcgccgataactcggtgcgctgcctgcgcccagatcatgccaatcttcatcgccttcctcctaaactgctatcggcgctttaatagtcgggtggtggcgatagttttcgatctcgatatcttcccacttataggcgtaaagattatcagcgtggttaagatgcaaagtagggaaggggtagggctcgcgggatagctgctcgcgcacctgctccacatggttgttgtaaatatggcaatccccgccggtccaaatcaaatccccgacttccagcccgctttgctgagccagcatatgggtgagcaaagaataggaagcgatgttgaaaggaacccccaggaacatatcgcaggagcgttgataaacctgtaatgagagacgaccgtctgccacataggcttgaaatagcaggtgacagggggcaagcgccattttatctagttccgatacgttccaggccgataccagcatccggcgcgaggagggatcattcttaatggtgtcaagcaggttttcgatctggtcgatattgccctttgggctgggccaagaacgccactggaccccgtagaccggtcccagctcgccctcggcatccgcccaatcatcccaaatatgtactttcttttcctgtagcggccctacgttagaggtgccggataagaaccagaacagttcctcggcaactccccgcataaatactcgcttagtggtaattaaggggaaagattctgccaggttgtagcgcagctgggctccgaacagtgagcgggtaccggttccggtacgatcttgcttctcgctgccagtttctaaaattttggccagtaaatcctcgtattgcctgtccgtcacgcgccctcacctttcgctagtccttgtccatattctagccgggcagcggcactttttgtttggtggcgggcgcaccggggcaataactggcgctatttagggcagttttgaggacacgcgccggtatccgtcctcactcagcgaaaaaatcttctccggtgcctgcgtgggcaggttcttgggtgaggtcaatgaccggagccagctccaccattagatcgctaacagaggcatcccgggagtctccgagggcagcctgcactcccttgacggtgcgtcgcgcaactgccttcccggatagataacctactccggcaccgatcccgaaggggattagccgtccgaccattcttccagcagtgcggtgagcaagtttcttcgaggcatatttcatcagcgccttatttacctgccccaaagtaggggaggaaagattctttagggaagcgcgcgcccaactaagcgtccgcagccccaactggtcagaaacaatctctgcacctttctctcctagcaggctagatagcaccaaagcgcggcgctgctcgcggtctttagggcgcaccccatgcagacgcgaaacccccaggatatagctggtagtctgtactgcgtagactgccagctctccggcggttagccccagggcgatcccagttccggtacccggcactgctgctcccgcccccactgctgaagaggcgtaagcggtgcgcttaatgtactgtttggttaaaatatcctccagttcacgcaggtcagcatggggatgggttttagctagccgcaacagcttattgtcaatgtattcgctaggaatatccaggactgcgtctattacttccccaaagttagatgcttggcgcgcttttgctactgattctttcagtgccgtggccatttgtttttgagagctgcgcttagcgggctggaaaaacttaggaactttacgctcgaacatttggggttttctcctggttgtgctggtaattgaaactggttagaatcaaaattacttgttgttattaggttagccgcctcggctgtaagtggcgaccctcgagaaaaaataggtcgaaagaaagggataaggattgcgtgatttcgagctattgattcactatccatcctcgccagagcaggttttgcagctgctaaatgatccgggttttttggaatttcgctggacgcaaatgccgaaaatccactgccaagtccaggtgaaaccggcgggggtgggaacttttgtgtcgcgagcaaaagtgaatattgcagatgtgaaaacatcttctccttacgggaagctgctcccggaccagttaataatcgaaatggttgagaactggcaggataatccggttccggggctgtttgcccaaggcggtttccagatgcggatggaaaaagttcccctgcgagtgcaggcagaaagcacgctagagtccgctggagcagacggaagtaagactttgcgacgcgtaaccggaaatctgagcgtagatattccctttattggcggtaaagtggaacgagaaatcctctctcacctgcaggatttggctcgcggggaagaggacgcggctaagcgttggctggcgaaataattcagcttaaacatctctatggatacccctgcccgagctgaggcgcgcctagcatagactattagcgtgagcggcatgcgggaactgatccaccgatatggaaaggatctatcagaaagcgatatagcacacctccatatgctggtgggtgactggcaggtgttatccgatattgccagcgccgacctaattttatggattcctgatggtgagggacgtttcttagcggtagcccacactcgcccggcctccggttttactattcacctcgatgacgtggtgggtttggcagcttccccaatgcgctcaggcatgttgaccgccgcttttgcccccgattcgcgacctgaggttcccgaggtgcgctgggcaggatcctattcggtgattgctagtgcgctgccagtcaggcacgaaggtcgagtagtggcggcgttgaccctagagattaatattcaatcactgcgggtttttgaacagcaagaacaatggttccatcagaccgcgaacttgatttgcaacatgatttcccaaggttctttcccctccgcgtccgttcctccaacaagtatgcatgggatgccacgtctgattgacggtgccattaacctagatgccgaggggcgagtattggacttgaccccgaacgctcgttcctgtttgcgccgcttagggttacgtgaagaggtcaacggtgcggtgctagcggagttaataaccgaggtagtccaggatcaatcccaagtcgatgaagctttgcccgtagtaatcatggggaaagcctcttgggtagcggaagtggagtcaccggcaggaacggtatctttccgggcgttgccgctagaagataatggcgaacgggtgggcgctctcctactgtgccgggatgtaagtgagatgcgccgacgggaacgcgagttaatgaccaaggatgccactattcgcgagattcaccatcgggtaaaaaataatttgcaaacggtttctgcgcttctgcggatgcagattcggcgctcagattccccggaagttaaggccgcgctgggggaggcggagcggcgggtggcctcgattgcgcgggtacacgaagaactatcacaaacggccagcgaaaccgtggacttcgacaatatgatttcccgtctgctacgcatgtcagcggcgatggcggcaacggatcaactagtggaaaccgatttcgtgggtagcttcggggtaatagatgccgataccgcctcggtgctggcagtggtgatttccgagttggtagctaatggggttgaacacggcctagccgatcatggcggcaaagttactctggaggccaaaagagagggaactgaacttgatgtgtgggtgcgcgatgatggcgtaggactgggcgataagccgctttctggtttgggaacttcgattgtgcgcactttagtgcgcggtaacttgaaaggtgcgattgattggagcagcccagaagagggaggaactcaggcacatattcatgcccacatagaggaggaagcaaactagatggggaaatcacgtcggcggcgcggctggccggaggtgccgacgcctctagccggtaaagtcattgacaatcacacccatttaccgctgtgggaaaaacagattcccctggtagagggggtacggctcagcttagctgaacaattggaacgtgcccgccaggtgggggtaagcgccatgattacttcgggttgtcaagtggacgagctagcacctacggtgcaattgactgcggaaaatcccgcggtattttgcgcactggcgattcatcccaatgaggcggctttgcacgaaaaagtggtggctactgccccggatgggcaaacctatcagctgcaggaatggcatcaacgttattctttagagcaggcagtccagcaggtttatgaagcggcgacctcctcggaaaaaaccgtagcgattggggagaccggcctggactattttcgaacttcccctcagggacggcaggcgcagcagcgcggattccggatgcatatttctctagctaaagagatggggctaccgttgcagatccatgaccgggaggcgcacgccgacactatccggattctgctggaggagggcgccccggagcggactattttccactgttttagcggcgataaagaaatggctcaggtgctggctaagcaggggtggtatgcctcgattgccggaccggttacctataacgccaatcagtggcagcgagaggcggcagcggcaatgcctctttcgctgttgctggtagaaaccgatgccccctatttgaccccccatccacatcgggggcagccgaatgcctcctatatgacggtatggacagtgcggaaactggcggaaatcactggacggagcgaaagcgaaatggccgatcagctggtaaaaaatacccgtgagatttacggcgagaaagtcgcggccttagccgaatagcagccggtaaataccgggctataaacccgggttgagctacaaaatagggtgtcctgttccacctgagaaattgttccaaaggggtagctatttggtaacaatcgggttacagttgtggttattgaggaatttgctaatgatttcacagctaaaaccggagcagtgagggtggaaatgggcaagaaacatcggcgcaccagcgcgaaaattacggcgatattcgccgggatttccgccgccattgtgttaggtgggggagttgccgtagccagcgaatacaagacagtttcggttactgtcgatggcgccacccggcaggtgcaaactatgaatcgcaccgttgagcaagtaatttccgatatggggatcaaggttgggcaatatgaccaagtgactcccgccctcggcacccagatgtctcgcaatcaacagatcaagattgtgcacgcccgtccagtggttttgcagggaaccaaagacgcaaaaattggatggggagtaaccgatcaagacgctcccaagttgcaggcaacttttagggttgacgggcaggaagttagcggctcctataaagagggcgcggatccgcgggtagcggcgcaggcagccggcattcaactttctacccttgaccgagtaactgtagaaaaaaccagtgcggacgcggctaccattcgggtttcgcgggtagagcgggatctttctaaacaagaagaagtgaccgcccctccggttaaagaagttgaggacaagaacctggagccgggcaagaaagtagttgaggacgagggtaaagaagaagtcgtcgcaaaaagtactttcgtggaaaccgtagatggggaagtggcgttcaagtcccccgaacaggtgactactgtggttaaagccgagcccaaaattgtgcgggtaggcccagatagctctgcaaactttgactatgggccggtagtgcccgcgggggaagcccaagaaatggctcacgagatggtagtttcgcgcggctggtcagaaggacagtttacctgtctagtgaaactgtggaaccgtgagtcaggttggaatagccgcgcggaaaatcgcagttccggcgcctatgggatcccgcagtccctgccgggaaacaaaatggcctctgccggggcagattggcgcactaatccagccacccaaatcaggtgggggcttggatatattgcgggacgttacactgacccctgcggtgcctgggatcattctcagaaacggggctggtattagtaggctagaggggtggaagaaaaccctgcagttaccctgctgactcccagcgtaattcaccggctatgccgccagctggatatccgccctactaaacagttgggacaaaactttgttactgagcccagtgctattcgaaaaatcgtgcgcgaagccgggataaaagccggtgaccaggtactagaagtcggtcccggactgggatcgctaactttggggctgctagaggcgggcgcctgcgtgaccgcctgcgagattgacccccgtctagcccggttcttaccggcaactattctcagtcacgcttccggtgctgccggtcagatgtatctgattcaaaaagacgccttaaagctgttacctgcagatttagtgggattgaaaagcattgcgccggacgcagaaaaaacagtgagcgagagggaagatctttcccgggagttttccccggaagttttagtttctaacttgccctataacgtggcggttccggtgttgttgcatttatttgcggctttcccttctcttaaacgcgcgttagtaatggtgcaaaaagaggtggcactgcgcctgtgcgccactccgggcagcaaagtctacggggtgcccagcgtaaaaattgcctggtacggcaaggcacggatgggatcagagatttcgcggcgagtattttacccgcaacccaacgtagattcggccttagtagagatcacccgggaaaccaaaacccctgttagaagggtattcgagggcaggcaaagcaacttagctccgggaacggcacctgcaggggagccaacagaagaagaacgccaagcggtttttaaactaatcgaccaggcgtttgcttcccggagaaagatgctgcgggcggggctaaaatcttgggcgcagcccctggccgccgcgcccctcttacaagcctgcggaatcgatcccactgcccgcgccgaaaacctgagtgtggagcactttacggcgctggccaggctgaggggcgctctcctttccggttttgaaaactcgcaaccggatcctagcgagcaaaatgcatctggtgaaggcgcgcctcaggattgtgaaaacctgccagtaggaggggaaacttcgacagggaaatccccgctcaaggcgcgcgcgagcgcccacgggaaaataaatctgttgttagccgccggggaagctgaagacggttaccaccgcctatccattgttttccaagcagtcagcctcaaagaaaccgtagagataaccctgcaaccagagggttttgaccttgaagtttccttcagcgccccgcccggcgcggttggctacgattctagccgcgaccaacaggcaatgtcggggctagatccgcagaataacctggctatccgagcatttgtgctggtatccgcgcattgtggttacgagggaggcgcgcagataaagattaacaaacaggtgccggtagcggccggcatggcaggcggctctgccgatggggcagcggcattgctcgccgctaaccaggtactgcaagccgggctctccctgggggaattggccgaactgggagctagcctgggcgcggatgtgccctttgggctttacgggggaaccagtttcgcggatcggcgcggtgaccggattacccccctgccgccagcaaaacccttgcatctggtggtggcagtttccccggaaaccctgcccactccaaaggtgtttcaacagtttgaccagtcaggcgtggcatcgaccgccttgccgactatagcggatataactgccctgctagaagcactttattctggaaatttggacgccttagcaaagttaatccgtaacgatttacaagccccggcgcttgccttacttccgcagctggaggcgactatagagaccgctaaagagcaggaagcgattccttttattactggttctggccccagcgttatttgcctagttgacagcgctgagaaggcagaagaactggccgctaggctggcgcaactagaacaagttgcctacaccttgccgctgactttttctgcctccgacatagagttagccagaaagcagtggttggcgtgagtatcttcttagctggaacccacgaagccggcgctctcgccggcccgcgccgtctactgtcaggaataaccgtcagcctcgctccctgcgaccggatcggaatcttaggtcccaatggcgccggaaaatctacgctgctgcgtctgctgagcggaacccaagaacccgatagtggcactgttacctatgcgcctgggataagttttgcctgcctatcccagcagcaaaccctggatcctgccctgaacgtaaaagaagaagtccacgggaacatccccgactatcagtgggcatcacagccacatctacgccaaatcgatgagggactcctgccggatatagatttgtccacaaagtgtggggagctgtctgggggacaggagcgccgggtagccctggcgcgcaccctgggcaaagatgcccccattttggcgttagacgagcccactaaccatttagatgtggagggagtagcctggctagcctgctacctcaataaccgttttagctctggaaacggagctttagtggtgattacccacgaccgctggttcttggatgcggtttgtaaccggatttgggaggtagtgcccggagttgatcccggatttgggcgcgaacaaattcccggacacgtggaagaatacgagggttcgtacgctgcctatgtacttgcccggatggagcgggcgcggcaagcccaggtggcggaagaaaaacgtcaaaaccagttgcgcaaagaacttgcctggttgcggcgaggcgccccggcgcgtacctccaaaccaaaatttcgcattgacgccgctgaagccctgatcagtgatgttcccccgctgcgtgacagcgtagagttagtgcgcctggcctcggcgcgcctagggaaacgagtaatcgagttagaggacgtgtccttttcttatccggggtcaagccgaaaaatcttgaaccaggtgacttggcggttaaatcccggtcagcgggtagggattatcggggttaatggtgctggtaaatccactttgttggggattatgagtgggaaactcaccccgagtgccggcaaagtcaaacgggggaaaaccgtgcagctagccaccttagagcaaactccccacatccaagggatgaatcccgatttgcgggtggtagaagcgatttcccagatcaaggaacgaatccagtggggggaacaagagataaccgccgccaaactggtagaaaaactggggtttagcaaagaacgcgcctggactagggtaagtgatctttcgggtggggaaatgcggcgtctgcagattgcctcccagctgctggcagaacctaatgtgttgattctggatgagcccacgaacgacctggataccgacactttggcgcagttagaggatctgctagattctttccccggcaccttggtggtggtcagtcacgaccgctacctgctacaaagggtaactgattcgcaggtggcgctgctggctgatggcactttggcggcgctgcccggcggagtagaacagtatttagagctgcgggcaaccggggagattcccgccgacaatgaccgtgaggatgctgccgataaaactaccggtgaggatagcgggaaaaccgggaagcagccgcaaaaaagcggggcggaaatataccgggcgcgtaaggaactttcggctactgaaaagaaactcgataagctacatcaacagctgaaacaggtagaccaggagttaagcgaaggtgccgccgatacttccccggaaggcttggagtacctgcaaaggcttaatcagcgccgcgcccaactggttagtgacgaggagacgctagaagaaaactggttgcgcctgtcagaaatcatggagtagacccggacaacctccggagctcaaaccggatgactatcagtgcaaaaacggggtagcctgcagggaattaacgcagaggacgcaccggggtgccttcgaaaggtaacaataggcgccgcagcagtcccgagagtaccttctgttcctcctcatctaagggagatactaagtctgactcccgtcgcaacagttccttgagagccgcatcaactcgggcaactcccttgtcggtgagggtcaccaacaccgcgcggcggtcatgaggggaaggggtgcgtttgactaaccccttcttttctagacgatcaatccggttagtcatggtgccggaagaaaccagcagctcctgcagcagggtgccgggggttaaagaatagggggcggcggcgcggcgtagcaccgacagcacatcgaactcccaaggctccattccttgcgcgctgaaggcctctttacgagccaaatctaggtggcgagccaagcgggcaacccgggaataaacctccatcggagaaacgtcaagatccgggcgttcaatctgccaagcgagaatgatgcgatcaacttcgtcagtagcatcagaggaaatattctgtggaatcacaagctaagtttactcgatgtcgagacaacggtctatgtcttattctcattatgggcactacgaagctaggtttaccgaaaatatggatctggacacacagctaagctggctgtcccgctgagcaccccgaatatgcgtagcctgccagctcctccgccatagcatttttgctcccgcgtgggcatatgcgtttcctgattaacaaaaaattttatgagtgaaagcggggtggttgctctcgttaatacattccggtttaggaaacttatttgccctgtgtaatatagaggagtattccgccctggtgtataggtaacacgcgggcttttggtgccttgagagccgggttcgaatcctgggggcggaactggcagttaagtgcctattctttccaatccggctacctacaaaggggtcaaataatggaaaatacgcccgctgcagcgattattttggctgctggtaaaggcactcgtatgaaatctgctcgccccaaagtgctgcaccccctagcgggcaaagcgctgctgggacatgctatcgatgcggtcgccgccctgaaaccaggggcgttgtgcgtggttattcgccatgaacgcgaagcggtagcccagtatgtaaacagctactgtccgcaagcaattttggctgaccaagatgaaatcccgggaaccgggagggcagtgcaatgcgccctccaaaaactgggtgagcaaggccagctcagcggaaccgtggtgattacctccggagacgtgccacttctggaaagctccaccctcgagagaatgctgcaaacccatcagggagccggaaatcaggtaactattttgactacccaagtaccggatcccactggctatggccggataatccgctccgaaaatggcgcggtcagcgccattgtagaagaccgcgactgccaggaaaaccagcgacaaatccgggaaattaacgcaggcatctatgctttcgatgcccagttcctgacccaggctctttcgggactggataccgataatgaccagggcgaggtttacctgacggacaccattgcgatagcggccggaaacgggcgcgccggagcctatctgctcgatgactatatgcaggccgaaggctgtaatgaccggatacagctggcggggttgcaccgggaatataaccggcggattcttaaccaattgatgaaggatggggttagcattattgaccccgaaaccacgtggattgaaaaaagcgtaactattgcggctgacgccgtgattttgccgggatgcgatttccacggcgacacggtgattggcgctgatgccgaggtcggtccctttacttctcttcgtgatgtaaaggtaggggagggcgctcaggtgcggcgctgtgatttgcaggcagtaaatatcgctaatggttccaaccattgttgcgaaaccaacctgtagggcgcttcatgacttgtagaatcaaaataacggcagggcgaatctggccaaaaatgaaaggtaacacgcaatgacggggattaaatccgcaggtcaaaaacaccttctgattgtaccgggacgagcataccccgaacttgcacaggggatagccgaggaactacataccgaggtgctgcccactgtcgcctacgattttgccaatggcgagatttatgtacggttttcagagtcagtacgcggggcagactgctatgtagtgcaatcccatactgctcctttgaacaagtgggtaatggagcaaatgattatggtagatgccctcaaacgggcatccgcggctcgcattaccgtagtcgcgcccttcttcccctatgcccgccaggataagaaacaccaaggacgcgaacccatctctgcccgcctgattgccgatttgttcaaaactgctggtgctgaccggttaatgagcgtggatttgcatgccgctcaagaacaaggattctttgatggcccctgggatcacctctatgcccaaccggtcctgatcgactatgtaaaaaggcgggttgatcaaagtaatctcacgattgtttcccccgatgcgggccgtatccgggtggcagagaaatgggcaaataagctgggtggttgcgaactagccttcgtgcacaaaacccgggacaccacccgccccaatgtggcggttgcccaccgggtagtgggtacggtagaaggtcgcacttgcgtactggtcgatgacctgattgataccgggggtactatcgccgaagcggttaaggtgctgctacattcgggagcaaaagacgtgattgtggccgccactcacggggtactttctccgccagccgccgagcgcctgtctacctgtggggctcgcgaaatcattgtcacggacactttgccgatttcagcggataaacgtttcccgcagctgacggtactaccaatcgcgcctctactggctagcgcgatccggaccgtttttgatgatggctccgttaccgccctctttgaccaagattaggtaaaaactcctggctttaaatgtgagttgccagaccttttcctacttccggttttacctggccggatcgggactatatcctgaaagcaggttgcctcggcgagggcgcatttgcgccgttatcgacgtggccgtggggaaacccacgtcctccggggttccgtaaatatccgtaatcctaaggaggaacatagaaatggcggcagaactttccgcacaagtacgcaaagaaaccggcaaaggcgcagcgcgtcgcgctcgccgcgcgggacagattccggcagttctctacggtcacactgtagaagaaaacctgcacctgaatctgccaggtcacgagactttcctgattgtaaaagataacccgaacgcgattatcaacctggatgtggatggggaaaagcacctggtgctgctaaaggaaatccagcgtcacccggtacgccgcgacattctccacattgacctgttagcggttagccgcgacgaaaaagtcgaggtcgaagtaccagtctcggtggttggcgagcctacacctggcaccgtggtcaacctggaaatcttcaacttgccggtggaagtatcccccttggagatccccgaagaaatcgttatcaacgtggaaggctgggaagaaggccgcgtcttgcgtgctagcgagctagaactacctgccggggtaaccaccactctggacgacaatcacgacgtactctccattactctgccggaagagatgccggaagagcccgttgctgaagagagcgaagagggcgaagaggattccgaggaagaagctacggaagaatcagcagagtaaccactggttatacttttcggggagggcgcaggccctccccgaaatcaatttttagggaaaagatttaaacgatataaaggggtagaaagtggcagaatcctggctggtgattggcctgggtaatccgggcgataaatatgcaggtacccgccataatgccgggcacctggtgatttcccatctggcgcaaacccaaggagagcagctgcggcgccacaaaactggcagccaggtagccactatgcgtctgggaatgcccggaatccaaacccccgctgtgcagctagccatcttggattcctttatgaacacttctgggattcctaccgcgaaactggtgaagtttttcgggattgatcctgctgaacgtttactggtaatccatgatgacctggatttgccggccttcgatttacgacttaaacgcggaggcggcgaaggcggtcataacggcctgcgttccatcagtcagaacctgggaaccagagactatgcgcgcctgcgtatcgggatcggacgtccgcacccgcggcaagatccggcagactacgtactttcgcgctttcctcggggggaacaagccgccctcgaagatgccctggatcgagcctgcgaagccgtaaccgaagtagtaaccgagggatttactcgcgcccaacagcgcctaaacactcacgccagttaggatgctgcagccagttaaggtttgacccccaccctagcggtttttaccttcgcgtccttagcacttaacccgggtagacttcccgcatcctgccctagctttcctcgcaagtccgtcaggccgctcagggtttgggcaatcagagccttttgagcatccggcactactgtcaacaaattcatctctacttcagaagcgatttttaacccatcggcggcggcctgcttgtcgctgccgctcagatcggcaaaaggctgataaaccgcttcccgcggatctgtccccaactgggtaaccaactcctgtagctgccgacgcaacaggggagtgatctcttccgaaaccagctctttcagctcggaatcgcgaccttgcgccgcatttttttcgatattgtagcgcagggcatctagctgtctaatccctttgctcagttctttcttttgctgatcgctaagaggagttttctcctcttttcctttgcgattttcctccgttttatcagggcgccacttgccatcctggtagcgcaaggcggacagctggctaggattagcaggcggtaaggttaaagaagcagccgccgcaatctgcttattttcacgctccatggccacgcccgtagccaccagtaccttcgcgagagccgcggtctgttttaactgtgctacttcgtccttatcgccctgggaagattcttggctctccctagccacggcagctagagtcaacccatcatttaaggcatttacctggcaatctactagcttttgcatcagagcttcactgtttcccggaatccgatagggttgcggttccggcaggttctccggtttttctttccccgctatctttacctggggactgggccaacgcggccccagcactttaccgcgcgcctcgaaaccatctttaaaagctaaaagatcgggactaccggcaaatacctgttcgataccggcaccgattgcctcttgacaggcactagctcgttggcgtgccacctgcgtctgatccgcacgcaccgcatctccgctgccatcatcgatgcgaaccccgcatccggcaagactcagggaggcgcttagtaataaggtaaggggaacaatccaagttttcttcatcaaagttaagtttgccacgggtaacatgtttttagaaataaataattagcgaggggaagaaatgagcaaagcaaaaactaaactagaagatgaactctacgagttattaaccggggattgcgaagatgctggactttttctcgaagacgtgtctttaaaacgtgccggaaaatatacccgcctagtggtaacggtagatttaccccgcggaccgggtgcggtgcgtgaagatcagctttctcaggcgaccttagagatttctcgacacctggatgaggttgacccgattaacggcacctataacctggaggtcactacccctggaattgagcgtcctctaagggatgaacgccagttttccagggcgattgggcatcagatcttggtgaagaggtgtgagggcaccaacgaagagggtaagctggtggctacgacaactgaagaaatcgaactggaaactgccgcgggccagcgcaccgtccccctaaaagatattgcgcaagcccagatggtagtgaagttctaaagctcgtaaggagcatcatggatattgatatggccgcgttacgcatggtagaagcggaaaagggtgtcagcttagataccctgatggctgctatcgaggacgccctcttgaaggcctaccataacgcccccggtgcgctcgatgacgcacgagtagaagttaatcgcaagaacggtcacgtaatcgtgatggcatccgagatcgacgagaacggcaacaagatcggcgagttcgatgacaccccctcgggttttgggcgcatcgccactactaccgcccgctctatcattatgcaacggctgcgggaagctgaggacgaccaggtgttggggtctttccgagataagcaaggcgaagtgatctcgggaattatccagcagagccgggaaaaagatgcagtagtggtcaaggttggcgattttgaagcaattttgccgaaagctgagcaggttcccggggaacagtatcgtcacggacagtggatacgcgcggtggtggtgaaaactatgcgcggggaaaagggcgcccggattgagatatcgcgccgccaccctgacctggtgcggggactatttgcgcgagaagtcccggagattacctccggagaagtggttattgaatcagtggcgcgcgaggccggataccgtaccaagatagcggtacgttctactcgccccaatatcaacgccaagggagcctgtatcggacctatgggtaggcgcgtgcgagcggtgatgaatgagctcaaccacgaaaaaattgacatcatcgattattccgaggacgtggccacttttgtcgctaatgccctctcacctgcacgtgttacctctgtcacggtggaaccggcagaacatgtacttgcacacgtggtggtaccggatttccagctctctctcgcgattggtaaagaggggcaaaatgctcgtttagctgctcgtttaaccggggcgaagatcgatattcattccgatatcgaccaggaatctgccgcggaggaatccgaaaacctttagtttaggtctgcgccagcttcctccggcttcggcttatttccgctaaagcgctagtatagaaggtggaacctatctttggttgcaatggatgcgtcggttctgggcttttgccttggccggtgctttattgtgagcggtgtaggaacttttcagtaaggttaccggcatttacacccagtagatgcccgatacaggaaagcagggttggaagctgatggtcacccgatgagcaaccagcgatgatctgccaattaaaccaatagcctgctcctcgctgggcaggccagcaaggagaattgtggcgaaacttagagttcatgagctagctaaagagctcggaaccacttcgaaaattgtgctgcaggcactaaaggactcgggggagttcgtaaaaagcgcgtcctcaactattgaggctccggttgcgcggaaaatgcgtgagcattttgccaagctagccgaagaacaagaggcggcggctcccaaagctaaagcggagaaacagaaggcggctcccaagaccgctaaagccaaggcgggggcgaaagctggcgctagcaaggcagctggaagcaaagccgcagctagcaaggatacagaagctaaggctgaaccccagtccaaggctaagccggccgctaaaggcgccaagaaaactgccgctagtaaagcagcgccgaagcctggcccgaaaccggccgttaaagaaactgaggcgaagccgcagaaaaaggcagcgaaaccggaggctaaacccggtaggtcagcggcgaaacctggcccgaaaccggctccgcgtcccggcggtccgcgcccggggaacaatccttttgcatcttcgcagggaatgccgcgtcccggcggtccgcgcccggggaacaaccccttcgcatcctcccagggaatgccacgccccggaggcagctccgggcagcgtaaaaacgctggtcgtggacgtcccggacgggggaatagacggggtacgggggcaactcctaatgtgatgcccactcattcagcatctgcgcctatgatggatcagccggctccttcgcgcggtcaacggcgcggtggcggcgggcaaggcggtccaggaggttccggtggtccgggtcgtcccggcggtcaccggatgaataaccgtggtcgcggtggttttggcgccactcaaggggcgtttggtcgcggcggttcttctaaagcgaagcggcgtaaatcgaaacgcgctaaacgcgccgagtacgagcaaacagcacccaagattggtggcgtgcaggtacctcacggcgatggctccacgcccttacgcttgcgttcgggtgcgtccctggccgatatggcagatcggatcgactgcgatcccgcatccttggtcaccgtattgatgaccttgggcgagatggcgacttctaaccagtctttggatgaagacaccttggtcactttaggctctgaactgggctaccaggttgaagtagtttccccagaggacgaagatcgcgaactgctggaatccttcgatattgatttgaaggaagaagaacaaagcgatgaggaagatgctaagcctcgtcctccggtggttacggttatgggtcacgttgaccacggtaaaaccaagctgctggatgcggtgcgcgataccgatgtggttggtggcgagcacggcggaatcacccagcatattggtgcctaccaggtaaacatcgatatggatgaggttcgccgcgcgattacctttatcgatacccccggtcacgaggcgttcaccgctatgcgtgcgcgcggggcggaagttaccgatatcgcgattttggtggtggctgctgatgacggggttatgccccagacagtggaagcgatcaaccatgcgcaggctgcgaatgtaccgatcgtggtggcggtcaacaaggttgataaacctgaagccaacccggataaggttcgcgctcaactcactgaatacggtttggtagccgaggaatacggcggcgacgtaatgttcgttgacgtctcggctaagcagcgtaaaggtattcatgaattgttagaggcagtgctgctaactgcagatgctgccttagaactgaaagctaatccggatgctcctgcccgcggggtggctattgaaactcgcctagataaaggacggggcgcggtggctactatcttggtgcagcgcggtaccttgcgcgttggtgactcgattgtggtgggttcggcgcatggccgggttcgcgccatgcttgacgagtacggtaatacggttgaggaagccggtccttctttccccacggcggtgctggggcttaccagcgtgccgggagcaggagactccctgctggtagccgaagatgaacgcactgctcgccagattgccgataagcggcaggcacagcagcgcgctgcccaactgggcaaacgccgcaagcggatttcgctggaagatttcaatgccgctttggaacagggcaaggtagatactttgaacctgattttgaagggcgatgtttccggtgccgtcgaggccttggaagattcactactcaagatcgatgtgggcgaagaagtgcagctgcggattattcaccgcggggttggcgctatcacccaaaacgatatcaacttggccagcgtagacaacgcggtagtgattggattcaacgtgcgcccggcgcagcgagtggccgaatacgccgatgctgaaggcgtagatatgcgcttctacaacgtcatctatcaggcgattgaagatgttgagaacgctatgaagggcatgctcaaacccatttatgaagaaaaacagatgggtaccgccgagatcttgcaggtgttccgttcctccaagttcggtaatatcgctggttcgctggtgcgtgagggtctgatcaagcgtggtgctaaagcccgcttggtgcgtgacggcgtagtagttgagccggaactgcagatttcttctctgcgtcgcgaaaaagacgatgttaccgaggttcgcgaaggctacgaatgtggtatttcgctgggcgtcaaggacatcaaggttggcgaccagatcgaaacctgggaaatggtagagaaaccgcgcgaatagcgttacttgtcggcttttcgggcgcgagtgtgttgcgcccgaaaagccgcattaggtgaaggagtttttcatggccgatcaggcccgcaggcgcaaagttgaagagcggattcaaaacacggtggcgcggcttttagagcgtcgcatcaaagatccgcgcatcggtttcactacgattaccgattgcaaagtcaccggagatctgcaacatgccactgttttttacacggtttttggagacgaggacgaccgcaagaaaactgcgcgtgctttgaaaagcgctaaaggtttgattcgctccgaggtgggtaaggcactagggattcgccttacccccaccattgagttcaccctcgatgctctgccggagcaagccgccagttttgaagaaaaactggctagcgctttgcattctgaccagcagctacgtggagtttcccaggcggcctcctatgccggagaggaagatccctatcgtaaaccccgggaaaagaaggtttacgaagacgctcctgctgcgccggctttcaccgagtggactggtgaggacgatattttgggtgaggacgcagagggcgacgctcccgcagaatcaccggaacctggcgagatagaaatatccggcgatgataaccacttcgaaagttaagtagctgcagttatggacactgctaaaggggctccggatttttctccggcaggggcagaactggaagttcctcgtgccgcaagaactgctcctgatggggtgctggcggtagataaacccctgggggttactagtcatgacgtggtttcccgtttgcgccgcttggcggcaacccgcaaagttggacacgcgggaaccctagatccggcggcctcgggtgtattagtggccggtattgggcggggaactaaattgctgcagtacctgcaaggacaaagaaaaacctatgccactcgggtctgtttcggggtggaaaccgatagtgaggacgctgaagggactattacggctaagcgcggagctatccgggaagacctagagaacctggaaagcgtgctagctacttggcgcgggcaggtaatgcaggtgccgagcgctttttctgctctgaaaatccgcgggcggcgggcagcagaccggattcgcgcgggcgaagaagtgaagctggaaccgcgtccgattactatctatgaactttgcgccctgggggagccgcaagcgggcgagcatgcagggacaccggtggtttaccaagatttaaaagttatttgttccgcgggtacctatattcgtgccctcgggcgagatctgggaaagcaactgggagtgggggcgcacctagtagccttgcgccgcctccaggtcggctcctttgacgctagcggtagtgataaccccaatgagtccttaccggcttattctttgcaagaattatcgcaggtggtagcggcgggagaagaactgccgctagttagcctagacgcggtctgtcgcgacctcttccccagctgtcaggtaaccccggaagtgttaactgcgttaggttatggtcagcgtccagaaatcagctctcaaattggcggtgacctcgggaaagaagactcggataaactcgaaaaaatctacgccctgcatcttcctgcccaagaaatatcgctattggcgtcgccagtggagggcaagtggcgatctgtactaagtttacaaagtaggtaaaaggagaaacatgagcgaagaaaagcaaagctccggcggttgcggttgtggatgcggctgcggtggcaaaggcaaaggtagaaaaacagcggaagaaaaacgtaccggcgagctaggagtgccggcgaacggcaggccggaactgggcgtgcggcaaagcgaaaagtaaaccgtggaaatctggacttcccctccgcaactggacaaagagcagcgcactgtcgccactatcggaattttcgatggggtgcataaaggccatacccggattttgaaaaccgtggtagagagggcgcgacgggcggggctaaaagcggtagcaattacgttctcaccccacccttcccagctgcataatcccgaaaatcctaccctcttaatccaaccgcttcccgaccggctggacgctatggcggccctgggactcgatgccacctgggtagtgccttacacctgggaactggccaatcaaagtccgcaaagctttatcgaccactactttgtggagagtctgcaccttaaagaactggtggtgggccaagatgtccaatttgggcaggggaatcgtggcgatatagaaactttgcgccaggcgggactggcccaagattttcaggtaatcgaggttgccgatattaccgaccaggatgcgcgccgctattcatctacccgggtgagagaatgcctagccagaggagatgtccagggagctgcccgtattttagggcgcagctatcggttgcgcggagtggtggagcgcggttttcggcgcggacggatgctgggtttccccactgccaatctgggaggaaccgaaggcctggcgattcctgccgatggggtatatgccgggcatttggtgcgttcggtgccgggaactaatgcagtcgagcatctaccggcggcgatttcggtaggcactaatccgcagttttcaggaaagaaaactacggtagaagcccatgtactggggcgcgctgacctggatctttatgatgaaccaatagcgattgattttattgcccgcctacgggagatgctcaaattagaaagcgtcgaaaagctacaggcacaaatggatgaagatttgcgttcctgcagcgaaatactgggggttccgccggcaggaagggttaatcctgacgaggtaaccgcgctttaggtttgctaaccggtagccactcggcatctctggcggtaactggttactggagcagacggcaaccaaaaaacctattgccgcacattcgaatcctgagaagagctatatttttagtggtgggactcgcactatcaagactgaaaataaaaggctagggaggatacggaatggaaactttacactttgcagttgtcgccttgagctctgtgttactttcgtcagtcctcgaccagatgatttcccgcgtctccctgcctttggtgcaaatcgggattggtttgctaatggccgtttttatcagcggccctcttgaatttagtttagatcccgagctgttcttggtgctctttatcgctcccttactctatgatgaatcccgaaatgtatctaaacgattgctatatcggcatctttcggcagtgcttaatttggcaatcagcttggttatttgcagttgcttagctgtaggcttcctcttgaactttttacagccgtcaatcccgttaacggcggcttttgctttgggggcggcgttaggtccgaccgacgcggttgcggtaggagccttgtcgggtacggtaaaacttaattcgcggcaaagcgctttactagctggtgaatcgctgattaatgatgcttccggaattgtttcttttcaattcgcggtggcggctgccgtcactggtgctttttctttaaccaatgcggcgggagcttttgccgtgtcgtttttggggggactatccctaggggtattactggggattatatctttgctgatactaaaggcagtgcgggggattgggctcgagtccacggttttccacgtgacttttgaactgctctcacctttggttttctttattattgctgaagagctgcacgtttccgggattttagcggtagttgccgctggtcttgtggttactttagttccgcagaggacgagtgcttttgctgctcgggtacgtctggtgtccggttcggtttgggaagttgtcgcgtttattctcaacgggattgtgttcatcatgttgggtacgcaaatcccgggggtgtttaacagtacttggcatgaaaatttgaatccgttatccctgattgggttggtttttgcgataactgccttaagcgtagtttttcgttttgtatgggtattgcttttagattggcgttactatcgacgtttgcagcgaaaggacaagttctctaacgagcttaaagaggcttttccaagcggcaaggttcgcgcccttaaacttattcaaaatgccctggtcactactttagctggacctaaaggggcagttaccttatcgattgcttttactttgccgctggtgacggcgggaggtaaagagtttcctgcccgcggcgagttaatctttattgcttccggcgttattctattgactttgttgatggctaatttcttgacccccttacttactcctactccggaaatacctgatgataccgagcttcatcaggcacgtgcccgggtaaagaagcaggtaataaaggttttgcgggaacagttcgcgtctcgttcccctttggcggtcacggtggtttgtacgcgtttgacccgccaaattaatgaggatttggattcttctcattcccataatcttttccgcgagattcggattgatactattcgtcaccagatgcgtctacttgatgaaatcgcggattctgggcaggcagataaagcggtagtagcggctatgcgcaaagttttacgtcgctccttactgttatccggttcgcagtctaccgcccatcatcctgggaaaagcttgcgcggtgttggtcagtttctgcgtaaccgtttaggggactggtttaggaagatgcggttaaagtccggttctaccccggtaattgaaaattctaatgagatgcatgctatgcgggtacggatggaagaggaagccatcaagtatttgcgtgcccgccaaagcaccaccgatgatttggagcgtcaagttgctgcttatctgctagagggccaccaggagataatggagtttttgaagaattattctcgctcccatccgaataatttgcaggtaaaagtagatcagttagaagaagagtccttgcggctgcaactggggtgtattcaggatttacgggaggacggtattctcagtgatgatttggctgatgcgctgcggcaggaagtttacctgttacaaatgaattatgctgatgctggtcattaagctaaatcaccattacgatctgtactaatacgattttcgcgatgatcccgagggcgaaggtcgcagaatatccagattcgcaacgctcatccgggatagtggtctgcacgtgactgaggattgccggttgccccacgaaaccggctattgctccggccatgcgggcagtagaaagtcccaagaattttccgagtagccacagtgccactagtactgggaccatcccgacagctgacagcaacccaatttttatgccggtcaaggaaaatgccttggcggcaaaggcctgcccggaagagagacccactgctgccaggaatagcaccagtcccatttgtcgcaacatattatttgccgagggcgccagggaaaatactaacggccccagccggtcaatgcgtcctaatattaaccccaccaccagtggtccggcagcggctcccagcgcgagggagccgagggatccgagcgggatggtgattaatccgagcgccacccctgcggcaatccccagcccgaacggcagataatctatggcagagattttatgttctgaatccccgaaagttttcgcgatatcgcgttcgcgttctaccgggtaaaccaccagcacccgatctcccaattgcaagcgagtagccgccgtggccaacatatcggtgtcgccgcgacgcacccgggtaagcagtgattgaaaacgagccggtaagaacaaattcgcgactggttttcctaccaggcggctattagaaactgtaaagcgcccaaagttaacggcggtgcggtcattggaaatatcttcttcaatcggcttgcccaatgcttgtcccgcagttttcaccgcatttgggattcccactaggaacgctaaatccccagattttagttccccatcgggatgggcaacccgcattttgccgtcccgcagcagataagaaacccgcagcccgccctcggcagagcctacgacctcggcaatcccaggtatttcctggattcgcatcgggttttctaccctgatggtttgcgtagctagcccggctgcagaagccggatcaggatcattttttgctgggagttttatccgcattagtgccgtcactaccaccatggttacgatcacccccaccgggtaggcaatcgcgtatcccactgccggctgggcgcttcctcccgcagcatcggtggctgcggccagggcgggggtggtagtgagcgatcccgcgaacattccccccaatagcggagaggtgagccccaaggctttgccaccaaaagctacaatcagggcgtatacggctagcaatgcaactgccccaattaatagaggagcttgcttgcgcaggtcgcggaagaaggaggcgcccgcggccaaaccgatggtgtagacaaatagtgccagtccgatggccgataccagggagagattttctccgagtgccggatcgagggctccggctgccagacctacgaataaggctccggctgctccaaactttagggggccgaaaggaatcgaaccgaatagggtgccgagggcaataactagaaatagagtcaacagaggagaagaggcgagtatttgcatcacctctttaggatagcgaggggaatacttcgtgtgccagattctcgatttgggtttgtagaatcggggcgaggaagttttgtagctggctgcgaggcatggaggctaccggttctagctgcacgatatagcgcatggtggccactccatagatcatggacatcaaaatttcgaccagcatatgaaaacgcgcctcaactacccgtttcttgcgaggatctagcttgggatctaccgcgtccaataattgggcaaccccttttaacaggttgtcactaatataggcgcgaaagcgttgggtggtttccgcatcggttattagcgcgcgcatcagggctttcattcgatccttggtgaggcgctcttcgtaaagggtaaaagcaaaatctaaaagccgatcagctgccccctccagtcccggttcccataactgcaaaatttgttccaggggatcaaggggtaaatcaaagcattcacgaaaaagtcgctgcttagaaccgaaataatagctaaccattgccgggtcgcagcccgcctctttagcaatcgaacgcatggtggtgccgtcgtatccgcgggtaatgaacagggtttcggcgacctgtttgatttgttcccgcatttttccgcgcgctccccgcggtccgcgcccaggcgccgccaaggttgctgcgctgtctttgggggagggcggattctgggggctaagttccgcggtattctgttcgccgctctttttgccgcgggggtgaaactcttgccgcggtttctggccggagacttggccgccctctgcttcctggttttccgagtttattcctgggcgcaatgaattaggaaacattttactttcgtaattctttgccgctaattcatcgctattgaaactctcgctgctttcgttttttcgtatctctgagcgttcctgctgattggcgcgctttttatcttttcttatgcccatagtcctatcctaatttcaacaccctgtgaatttagcgttttcaacctagtttgaggggtgaaaacaactccgggaggtgccatgagtgaaaccactgccgcctttgattttgcgggcggcaaaaatgctgcctttagtcaaggtggtcaggtgctcaggctaggcatcgatattggttccaccacggtaaaagcggtgctacttgacgggcggcaggtaatcttttccgactatcgccgccaccacgcggacgtgcgcggagaactggccggcctgctgcgcgatatcaacgcagagcatccgggaattaccgtaaaagcggcggtgaccggttcgggcggactctcggttgccggagctatgaaagttccgttcgtacaagaagttatcgccggcactaaagcggtcggcgacactcacccgcaaaccgatgtgattatcgagctgggcggggaagacgccaaaatcacttatctgcatcccaccccggagcagcgcatgaatggcacctgcgccggaggtactggcgcctttatcgaccagatggccaccttgctgcacaccgatgcctcggggctcgataaacttgctgcgcgtgccagtcagctctatccgattgcctcccgctgcggggtgttcgctaaaaccgatttgcagcctttactgaatgagggtgccgcgcacgaagacctcgcggcctcgatatttaccgcggtcgccacccaaaccattgcgggactggcctgtgggcgcccgattcgcggaaacgttatgttcttgggcggcccgctgcacttcctcccgaatctgcgcaaagcctatgaggagctgctacctaaagccgatagtttcttcaccccggagcacgccgaactttatgtggcgctgggggcagcgcttagtgctgataaaggggagccgcgccccctggaacagttaataactgacctgaccaccgggaaaatcgatactgattcccagcggatgcgccccctatttgctaacgaagaagaattggcacagttccgcgcccgtcacgataaagaagtaatcccgcagttgccattgtctgaggcgcgggggcgctgcttcctgggggtagattccggatccaccactattaaagcggtcgtgattgaccaggataaacggatcgtattcacccactatgcctctaacgagggcgacccggtttcggcggcagtggagattgtgcgccgcatccgcactgaactgcccgcgggcgcctatattgggcgtgcctgctccactggttatggggaggggctggtaaaaaccgccctcaacctcgagcaaggtgaagtggaaacgatggcgcatttccgcgccgccgaggacctgctgccgggggtgtcttcggtaatcgatatcggcgggcaagatatgaagtatctgaagattcgcgccggagccgtggattctatctcggtgaacgaggcctgctcgtcggggtgtggatctttcctgcagacttttgcggccactatgggtaccagtgttcaggctttcgccgcggacgcggtggctgcgaaatccccggtggatttgggtactcgctgcacggtgtttatgaactcttcggtcaagcaggcacaaaaggagggggcgagcccgaaagatattgctgccgggctttcctattcggtggtgcgcaacgccctctataaagttattaaactcaaaacccccgaggagctgggggaaaaggtagttgtccaggggggaactttccttaacgatgcggtgctgcgggctttcgagctgctgactgagcgggaagtggtgcgtcctaatatcgccggtttaatgggtgcctatggggcggctttgattgccaagcaaagtgatgatgggcaaggagaatccaccctggcaaccttggaagacctggagaacttccaggtagagactacccgcaagacctgtaggctgtgccaaaaccactgccaaatgaccatttctaccttctctaatggggagcggcacgtgtcggggaaccgctgcgaacgcggggcttccttagagaaagtgccgaagaagtcggcgctaccgaacctgttcgactggaaatataaacggattttcgggtatcgccgcttgaccgaaaagaaagctttccgcggggatattgggattccccgggtgctgaatatgtacgaaaactatccgctgtggttcaccatgctcaccaagttgggattccgggtgatggtttcggggcgctccaaccacgacctgtttgaaaccgggatggagtcgattccgtccgaaaatatctgttacccggcgaaactggtacatggccatatcgaatcgctgctgaagaaagggataaaaactattttttatccctcggtgatttatgaacaacaactggtggaaggcaccgacaactgctttaactgcccggtggtgggtacctatcctgaggttatccgcaacaatatggagtcggtgcaagacagcgacgtgcgcctgatcagcccgttcttaaacctggggaatcgagagtttctgcctaagcggatcgcggaagtattcgcagattggaacgtgaccgaggcggaagccaaagccgccctggatgcggcttgggaagaggacgccgccgtcaaagcggagatccgggagaaaggccgggaagccttagcgtggattcgcgaaaacggggtgcgcgggattgtgttggctgggcgcccctatcacctggatccggaagtcaaccacgggattccggagctgattatcggcttgggaatggcagtgtttaccgaagattcggtgcttgatggccgcttggagcgccccttgcgggtgcgtgaccagtgggcttatcactcgcggctctatgaggccgccgctcgggtgggcgacgagcccgatttggaactggtgcaactgaactcttttggttgcggcgtggacgcgattaccgcagaccaggtacaagagattttggaggggcgcggagacgttcacaccgtcctcaagattgatgaggtttccaatctgggagccgcccggattcggttgcgttccctggatgcggctacgcgggagcggcaaagctccacggtgcttacctatcccagtgcggatcgtatcggcgaccccgatgccgcgccaggagagccagaggaagcggcagttcctacccgcatagatccggcagccgaagccgccgcggaagaagctcgcctggcgaaagccggacatgtgcaggtacacgcccagttcaccgagcagatgcgcaaggatggttgggagattctggttccccaaatggcgcctatccagttccgcctggcgcagccggtggtgcgccgcgccgggttgaatgtgcggttgctggaacatacttcccgcgaatcgatggaaactggcctcaagttcgtgaataacgattcttgttaccccgcgattgtggtgattgggcagttaatcgaggagtttacttccgggcgctccaacccagataaaacggcggtggcgatttcgcagaccggaggaatgtgccgggcaaccaactatgcgtccctgttgcgtaaagggttgcgtgatgccgggtatccgcaggtgccggtgattgcggcctccgtgcaaggcattgaagaaaatccgggattccagctttcttggccggcaatccaccggattttgcaagctatctgcttaggggatatgttgcaagccatgcttttgcgggtgcgtccttatgagctggtgaaaggctcggcgatggagctgtatcggcgttgggatcagattattcaggaatggtttgcggctggaaaatactcggccacctggggcggtcgcctcagctattcccgcctgattagggaatgtgtcaaagagttcgatgcttttgagttgaatgatgagccgcgccgcccccgggttggtttggtgggagaaatcctggtgaagttccacccggatgctaataatcacgcggttcgggtgattgaggaagaaggctgcgaagccgaactgcccaccctaatccagttcttccactactccctggccagcggaaactttgaacgggatgaaatgggcaattcccgcaaagttaagttagggatggatgcgggtctgtgggccttagagcgctatgaggacgcaattcgccgggcttttgccaaaactaacggcaagttcgagatgcatcgacgaatcaaagatatggcagcacgttctgtcgatattgcgggaatgggtaatcaggctggtgaaggctggtatttgaccgcggaaatggtggacatgattgagcatggctgccccaacattatttgtgcccagcctttcggctgcttgccgaaccatgtgattggcaaaggcatgttccgcgccctgcgcaaccgctacccggaagccaatgtggtggcagtcgattatgatccgggtgcctcggaagttaatcagctaaaccggatcaagttgatgattgcgactgccctgcgcggtgaagaagtggctgatgatttcgaggatatgcccgaggaagcgaccggggcaggctgcggatgcggcacctcttgcagtagcggagtgcaatggaattctgagatgcaagtcagccctgcaggtaggcgttccctgccgattaccccggtgagtgccgcgcgctaaaactggcgaactactagccgaggacaccccattgtgaccccggtaatactgatattaacccctacgcccgcagcgcgcaggggtgcgtccagtctttctgaagataccgggaacagcgggaagaacgcgggctggttattccctaatcccagctttcacggcggtaatggccagttcgccgcgggttgcgcaaccggtgtggctgaggatatcggaaacataggatcgcacggtggcttctttgagctttgtttgccgggaaatgttcttgttggtcaaagccttaagtaaaagccgaaatgtggggcgcagatgagctggcagagtagcaaccgcatcaataaaatcggcgtattgttcccggttgtcttgggtttgcgcgtatgcggctgtcaggatttcggtggggcgcggcgccattacctgctgaccggcgtgggctttccgaattagctctgcgagttctggggcgggaatgtctttggtgaggaacccgcgtactctggctccgattgcttgccctaaagattcttcgtgttcgaaggcggtgagcataacaatcgtgatttctgggtgttcgcggctgatgcggcgagctgcttcgattccgctaatcaccggcatatccacatccagtagggcgacatctatccggtgtaaagctaatagcgagaacacttcagctccgttttcggcagtggcgactacttgcaatccgtcttgggcgttcaataaatgagcgaggccgtcccggataatctggtcatcatcggctagcaggattcggatttcgtttttactgttcactaggggctccctcgtcgctggtgttttgcactgataggtttttaggtttgtgcttttgggcaggtaaaacgatgtaggttagccactggccgcccaggttagttatttccatcgttcccccttcctctcgaatcttgctgtcgaggttcgcaaggccgtaaccgctgctgatcccggtagtagccggggtgtctgcaatctcgttactcagtgagatggtgagttctttctgctcggcttgtagctcgatgatcaggtttgcctccgaagctgcaggtgcatatttcaagatatttgaggaacattctctgattgccaatgctccggtgaggagctgttgccggcttagtgcattatctaaattttcgggtaacaccgtatcgagagtgatgctgcgagtttgcaacattctttttacttgttgaactacttcagataggggagttttgctggcagcagtgtcaatcgagaggatcatgggacgaattcttcttgaagccttagtggcggcttgcactagcggattcatctcgctgctcagctcggggtgacgtaccgcaatatcttgggcgagtacggtcacatgggccaggtctttggcagtagtatcgtgcagttggcgagctagttctttacgggtttgaacagtgcttttacgtatttgctctctgtcgtgttctgccagaatccggcgcgtgttttgccaccgtaacgccaatccaatcaccaaaaccataaccgcgattaatgcggagctaaacgcttggaggctgggcgtagcactgaccgctacggaaattactccctctagtaacagtactaagactgctggggcaatccaggagcgtatcagccaaaacaccagtaaaatatcaagatcaaaaaccaccatcgcgtaaccatcaatcagatccagcaggttgaaaaggagatagcaggcgataaaaatgaactcacatggctgaaaccaccctgcagccataaacacggcaatcaggatgagggtgaaacagatactttttgtggaaattgattgctgccccattagcaccgaaattgtgtccagtatcagcaggaaaactgacgataacccaaaaaccagtggctgtatcaccgggtaatgtcgatagctgggaaataaggaagcaagcatgcctcaaaaatatattaaatgcttagcgaggtcgatacttttcgcatctagatattcccaatgcacgcaataccgacgaatgtcggtataactgaccgacaatcgtcggtatctatatttaggtttgtgtgggtaggttggacaaaggtgtgtagctagcaaagaaagtgcaggaaaacatgacagccagacttgtcgtagcgaaaaatgcaaccccaggttagttagctctttgaaggatatcccgggagcgggttattgatgtgcataaagtccgtgttcaatactcttgtatctaaaagaccgaaaaacctattgctcaaatattgttaccgtgtattttctcggctattaagcgaggcaaaaggattattttttaggcggctttggagatagggagtgtacttgtgttaaaaagattagtcctcacggtttttattgggttcattgttgttgttttagcgctggggtctgtgctttttaatttgaaaaacaactcggtttattatgctcaaaatactccacacaaaaagggtgtggagccggttcttatggaactagtgcgtaatttacgttgggtttcgaatcccgatattgagggaataaagtacgattttgatggaaataatgtaattaaaaatactaattccgccgggcggacgacagctcttgcatattattatgatgaaacctatagatattatgatggtggcggagctaatgcttataaatttgataaacaatttagatttataagtatatggaatagaaaaaccagaaaatatgtaactaaaattagcgatctttcacaagtgaaaagggatatttatcgtactgttcagccggtgattgatgcccagccggagccgttgattaatctgcagtggatttacgattgggttaataaagacagatttaactaataatcgtcacgattttattttgtagtttagctttttaaggaccgcggtagggaggtggggtgcctgtgctgaagaaagttgtgctttcggtttttattgggtttattgttgttgttttagcgctggggtttgtgttttttaatttgaaatctaactcggtttattatgctcagcgcactcctcatagtgaggaggtggagccggtgcttatggaagtaacgagtaaccttgactggatctacgctccagatattaaagggataaagtatgattacgacggctatagaaatatctacaataataaatatgggaaggatgaagctgcttcccttgcctattacttctcggaagaatggtcgtatgatgatggcaatttttttctctataggtttgataaaagatttagattgatatcggtgtggaatgtgaaaactctagagttcacttctaaacctgtcgatgtttcagcggtgaagagggatatttatcgtgttgttcagccggtgattgatgcgcagccggagccgttgattaatctgcaatggatttatgattgggttaataaagaccgatttaattagaagtctgcggggttttattgcatatttgcgattttcaaggatgccgtagggaggtgggtgcttgtgttgaagaaggttgttcttggcgtttttattgggtttatggtttttgtgctggcgctggggtttgtgttttttaatttgaaatcagactcggtgtactatgcgcaacgtactccgcataaagccgggatggagccggttcttatggaactagtgcgtaatttacgttgggtttcgaatcccgatattgagggaataaagtacgattttgatggaaataatataattcacaattttaattatgctgggagggattatgcgtttacttattaccctgatgaaagatatagatattatgacggtgggagagatttagcttataattttaataaagattttaggctcataagtgtatggcaaatcggaattggggaattttcttctaaacctgttgatctattagcggtcaaaagggatatttatcgtactgttcagccggtgattgatgcgcagcaggagccattggttaatttgcagtggatttacgattgggttaataaagatagatttaactaaatctcggtaggagtttatttcgtacttgcgattttcaaggatgtcgtagggaggtggggtgcctgtgttaaagaaggttatttttggcgtttttattggatttattgttgttgttttagcgctggggtttgtgttttttaatttgaaatcaaactcggtttattatgcgcaacgtactccgcataaagccgggatggagccagttgttatggaactggtgcgtaatttacgctgggtttcgaatcctgacattaagggaataaagtacgattttgatggaaataacataattcataatattgattccgctggaagggataacgcttttacttattatcctcgtggggtttacaaatattattatgatagcggcgctttagcttattattttgataaacattttaagtttataggtactttcaatgggaaaacactaaaatattctactaaacctgttaatctatcagcggtgaagagggatatttatcgtgttgttcagccggtgattgatgcgcagccggagccgttgattaatttgcagtggatttacgattgggtcaataaagacagatttaactagcgacatcctcacggcttttggaatgcatgattaggcgcggttgctttttatccccgatactgccgcagaaaaaatctttacttcttacggcaagaaagcagcaaaaagtaaagattttaagggtacgaggtaaagatatgggtctacgttatgttctggcggtcaaaaatgattttcatgctaaagaatccagaaaatctgccgcctggtttgcgtcctcaaaaactgccccatcttcgggatctttaccttcgataactctttgtgcgtgtgtcagggcgcgagctgtctgcgccttaggtactgggcggcgcggggcagaggccagggtatcccactgggtggaggcaaggcgacgttcactgccactgatcaggtcaaacaaatctggttgccaccagccgcgttgcccacgcccgatactaagcggcgccactattcccgccgcaactaaatctttggcagcgttctcgatagcggggcgagaaacctttaaggtttgagcggcagaagcgatagtgaacatcggcaggttaggcagtttctcccgcaaacggttagcggccgcatcaatgcgcaaggagcggtggtgctcactgaggtaccaggaatctagccgcgccttccaatcggtttgcagctcctcgacttggttcttgaggctttcggaaatggtgagcgcaatctggcaagcatccaagaatactttgatccaacgattctccgctgatattgcctgttcgctgcgggggacggcgaggtggcggtaggaagaaagcgcgtcctcgtaaaggtcagttctagtggcgagcgccaaagatagcggcagggtagccccctgggtgaggccgcggcgagttaaaacaatatggatcagcgcccgcccgatgcggccattgccatcggggaagggatggatggattcgaactgcgcgtgcaccagcgccgcctgtagcagcgggccgtgctccgccccatttaaatattttaccaggtcatttaataaggcatcgaggtgttcgggggagggtgggatatagctggcggctaggggatggtaggagctgccccctaaccagttttggctgctgcggatcccttgccaagtttcctcgtggattagcttctgctgcaaatccacaatgtcgagaagtgaaaccgtctcggcgctagctaatttgttggttgcgtcctccaatatctggatattgcggatgacgtccccagcggtgctgcgcggatcggtgccgcttttttccttcagctcggcgcgagccagttcgcgcggagcaacctgtaatccctcgatattactggaggcgatagcttcaccgcgcaagattagccgtgccaaagactccatccctagctgggagattagcggggaaaacgccaggattttttgctccaaaatagctgcggtagcggagttttcttcggtaatcacaatatttcccgccagcaggtcagggacgtaggagcggtaatcgccgctgcgccgcccttcccgagaaaacgcagacaaattcgctggccaatgacgcttttcgtaatgtcccatgcgtttcgcctccccaggacttagtttcccgccacctttgcggcggcgctgccgtattgtgggtgtttccggtattgctgaaagttcttactttattttcgcactttaaagtaggtgattgcaaggataagacttatccttacaaaagtgaggggcgggtgaaaggataaacgctatccttacaaaacttgccggtgggtgtaaggataagcattaagtttgcgctaggagggcagacttaggagatagccgaattaggggtaaccgagttcgcccacctatttggatcctttggaaaagccggtttcagctcacgctagactttaaccatggcaaataatgaatgttccccgctagcattgcctgaaaacaggcagtcagcagggaaagcccttcctcggaggctcccaagcacaaggatcaaagcactggacgggatgcgcgcgttagcaatagtggcggtagttctctaccacctgcgccccagcgtgttacccggcggattcatcggggtgaccgtattcttcgtgctctccgggttcttgattactcgcagcgttatcagcgccctggataagagaactttttcttaccggcgctacctgctgcggcgtttctggcgcctatttttcccgatagttatcactattgcgcttgccgccgtcctgacctatctattcgcccccagcctgctgctgaaagtgcaaagcgactgcctaccggcgactttatttgtcagcaactggttctatatttttcgcaacgtcccctatttcgcggcggcggggctgccgtccccgctcacccacctctggttcctgggggtactcgcgcagttctatgtaatctggccgctgattgtttacttgttgcaaaaaatcaggcgcgcggctccggcgattaccgcggtcttgattctggcgtctacggcggccatggccttcttctggctgcagggaaacggcgttactcacgcgtactacggcctggatactcgcgcaggggaactgctggtgggcgcatttttagcgtttattttcccgcaggtttcttcaccgggttccggttctgtttctcaggcgaagaccggtaagagcgcgctgctgcaggtgctggcagtcgggagcctagtggggttaatagtcttcagcatcttgggaaatggggaactcgcggcgatttatctcggcggtttcttgctggcggcaatcctcagtgcagtgataatcggggcggcggcctccgctggctctctaatttcaaaactgctaagcaacccagtattcaactacctgggttcccgctccttcgccctctacctagtgcattttccaatcctgctgatactgaatccggctacccgcacagttccgccctcctggtggcagcaactcttgcagctactgatagtggcagttgccgcggaagttttctatcacctggcagaagcgcccgccaccttgctgagttctctttggaaaaaaccaggagaaaagaaacgcgcgaaacttcgggcgcagggctggctgcgtaaagtgcagctaactgtgtttgcggtactggcggcgctatcactggtggtagcggggacgctggctttttatcctgcgaactggcagcagatagctaaagaccgagccgtacagttgcgcccagaacttgcctccgtctcgtcctcgaaatcagaaaagcaagaaaataaggataaagacagccgcgcgaaagaagataaagcccccaaagggatgaaaccggtggcgaagaagattccccgtaacctggataccaccgggtggcagatcgatcccgaaaccggcagctgcaacgcagatgtgctgattattggcgattcgataaccgagggggcaagcgccgccatcaagaaagtgttgccacaggcggtagtggatggggcagttagccgccagattcaaagcggcccggagatacttgccaactaccacaaccaggggattcatcctcgcgtcctggtgtatgccctgggaactaatgcggcgctgcgcggtgatttgctggcgcaaaacctgatcgacagtgccgagggcgagcccatgtatatagtgaccatccgcaatccgtatcctttgcaagatatgaataatgaagtgtttaaccggctatctaaggacaatccgaatgtgggaatcattgactggtgggcggccaccgaggggcatccggaatacctggtagatgatggaacccatcccaccgctgccggcaacgaggtgctcgcgaacctgtacaagcaagccctgtgtgggcggtagggggcttcggcgcatctaggaagtgttttagcttcagcgggtgataagtgtggctataccagagagaatggctgccaaaactgccaccccgaccgtgccgaatagccatttgatgaccttgtcgcggagtctaatgtagggctgtaagtcctcggtaccagggataacccacgccctggtgtgtcccacccagtattcgtctaccaagaaacggtcgatgaggttagtgatgaataaaattgccgctatctgccaaaagcctgccaggaacccccgggtgtcatttatcgcataaacacagaccagcgtgtaaataatgtagccgggaatgcaaattgctttgaaaatcgcgcggccgcgtttgattttattatgcgtggtcaatcccaactttacgcaccgttcctgcacctgggaagggtaaagatacaccatattaaccgggcttttgcggatgccgatggcgcagagcagaatcagcagcgcgcccagcaccagtccttccaggacaactcgtaaaatcatcgttccctttcccctgaaacgccagccggatcgggctttgaactcaagaaagtagccctttgacctggcaaactccacttttcgacttaaatagtttcgctcattttccctaaatttaaaaggtaccggatttgctcaatccctttgttcgcgccccgggctttattggcgttaaggacgttagcgttgaggtatctttcgagggcgaggcagaggggttaccttaggggactgctacgtcttgggcagcgctgcggcgctccgcgatcagttcctcaacaaggctgctcgccccaatttgtctctttatcagctctttagcctgctccacagtcatggtgataactccgtgcggcgtttccatcatcagcagctgggtgcctggttcccatttttgtttccggcgcagcttagaggggataaccaaccgccctcggtctttcataacagccgtataggtggtgctcataacttgagtttgccacattgagaatgcgcgagtttactccgcggggaagtcgggaagagtaccggggacctgggtgcgctggatacggggtgtgttttatccgaagatattaattattactaattgcttctaccagcaagaaagccttaaatttgtgtaaatatttgaattcttgtcccaaattacttgcatatgttccaaattgtacctatgcttgcgggtaacgaaaggggacggcttgaagaaacgcaatgttatcaatctgattaggtatcacgaagataaaaatgaatcggccttccgcgccgaggcgtcagaaatcgctcgtgactttgaggttgccggtgacgtggagttagccgcgtatattatggctcttatttcggacgctaacgcttttgttccacaaacgctaggggagggcggaaaagattttctccggcctctggagtctgcctcagcgccattgcctcttccggacgctatagccatggacgtgaccggtgtatgcaatgcaatatcccacaatattggggtgaataagtttttgttccaaggccccccgggctcggggaagacccaaacgtctcgtcaaatcgccagaataactaatcgtgacctttatctggtcgattttaacgcggttattgatagcaaacttgggcaaacgggcaagaatattggtcgcctttttgcagaaataaacgagatgcggcatcccgataaagcagtggtcttgttcgatgaaatagatgcattagcgctcgaccgggtaaaccaccatgatgtccgggaaatggggagagctacttcggcattattaaaggaactcgactctctaaatgaacaggtggtattgatagccactacaaatctttatgaggagctagataaagccctcgtcagaagatttgattccattattgattttggtcgctacagccgggatgacctgttagaaatttccgaagtgatgctgagtggattgttggacaagttcaaaaatgtggcacgcaatatgcgcttgttccgaaaaatcatgaatcaaatgccagagattccctatccgggagaacttgagaatatgctgcgaacttcgcttgccttcagtaaaccgggtgatctctacgattatctgcgccgtctttactctcaggcttgtccagatacttctattagagattatgcaaaactgagtcagcagggtttcacgttgcgagaaattgaagtgctttcccaggtgccaaagacaactatttcccgggaactacgggaggtgcgtggtgaataacctgcttcagcttaaaggccagttccaaaccaaaggtgctcgcggaccgggtttgcctcaactacccaagaatggggaagttactgccaagcacctgctagatttgcgtcaacagctgatggaaataaaggagtattggcataaaaagcagatacccttcgatcccttgatcagcgtttactataaaaaaataacggctaaaagtaaccggattcgccgcctactcggcggaggtagctctagggctagtaattccattgtaggagcctgcttcgaggggaactaccagaacacccaccatgtgattacttattgtgtcagcgaaaccacggttgatgattccatcgatgttttggatagttgcgcagcaattgttgagcaacacggtggcactatcaattatgaaatactggagcaaataaaaaagacttccaaaaataagtggatttataaactgccgaagagcagctttttccaggtaatcagggatgcttatttcgctgagcgtttcggcatacgtgctcagcaggaggcagttgacggctgggtagttgtaaatctttacgataccggctacagcgatgttcgcgattttctagatggtttgggtttaagagtcacgcctgaccaggtgttgggaagcgctctccggctgagcccggagcaatacagtgtattgatagggaaatatcccttcctggtatcgatggcgatttccgatatctccgaattgacccccgaagagttcgatgaggcgggtatcaatcctttggatatacctaaagctggtaatgaacccattatcggagttattgataccccgtttgatgaaaatgcgtatttctgcgattgggtggagtcaataaatcggattccccctgaaattgaaatacgaccggaggattatgctcacgggacaaaagttacatcgcttattgtcgacggtccgagtctagtaccggacttggatgacggttgtggtcgtttccgggtgcgacacttcggggtcgctaccgggtcgcggtcggattcgtttgcattcatgaggcgcgtgaaaagtatcgtggaacagaaccgtgacattaaagtatggaacatttctcagggttctgtgcgagaggtagcgcgtaactttgtatctcccgagggtgctattctggacgaattgcagtctcgctttgatgacattgtttttgtagtggcgggtactaatcaaacccatgaaaagcagcagaaaattggggctcctgctgattcaattaattccttagttgtaaatgcaacctcattttcaggtgaaactgctagttattctcgaagtggtcccgtcttggaatttttcaaaaaacctgacgtctgcgcagttggtggagataccggtggtctcatgtatgtctatgcaggaaacgggggttcttgggtacagggaacttctttcgcggcaccgtggataacacggaaaatgacgtatttgatgcaggtaatgggatttaatcgtgaagtagccaaagcactggtaattgacgcggctgcgggatgggattttcttgaggattctaagcgaggctatggtcaggttcctattcgtatagaggacgtggttcagtctaaagatgatgaaattaaatttgtcttgactggggttgctgattcctacgagacttataactttggtattccagtgccggtcgtaaacagcaagcacccgtatattgcccgtgccaccttgtgctattttcccccgtgtgaccgtcgtcaaggcgtggactataccagtactgaattggatttacactttgggcgtattgacgacaagggtagtttgatagcacttaacaataatcgccaaggtgaaaatgatgattacactactgaggctacggcgcgtaatagctaccgcaagtgggataacgtcaaacatatcggtgaggtttttcgtaacggtcagcgcggtaggaaggcatacggaacacagatgtggggtttgaaaatccgcaagaccagccggtgggataatcctgcgagtgccccatttggaaatctgcggtttgggatagtggttactttgtgggaaatggatggcgtgaaccgtatagatgagttcattcaaaagtgttcactgcgtggttggattgtgaacaaggtggatatacaaaaccgcttggatatctacaacgccgccgaggtcgagatagattttaaagaatagcttttatctttacaggagaaatgtgccaccggaacccattttgctatcggaaacaatcctttggatttagtgggggagggtgagaaccgcgcggcgcgaacagtcggttcagactcagaagtgacggtttgcgagttagtgatgatttgcgaatggaaaacctcaatcgaaggatggttaagaaaaacggtatgacgaagaatagtaaagctgaaaaaagccttggaaaggccagttctcggacgataattaagcatgattccgggcaggttctgatatttaccgctcagtccggtgtaggtgtggaagtgcgctatgaggacggcactatctggttaacgcaagccctgatggctgagctgtttggcgtagaaagcaacacagtcacctatcatctgcaacagattttcgagtccggcgagctggcggaagaggcaactactcgaatttttcgagtagttcgccaagaaggctctcgccaggtaactcgccaaatccaacattacaacctagacgcgattatctcggtcggctaccgcgtaaactctattcgcgccacccagttccggcagtgggcaaccgcagtgcttcgcgactttactctgcgcggctatattattgaccgcgaccgtatggagtcggggaagatactggggcacgactatttcgaggaactactccaagaagtacgcgaaattcgtctctccgagcgccgcttttaccaaaaaataaccgacatctacgccactgcagtcgactacaaccccaacgcccccacaacaaaaacattctttgctgccgttcaaaacaaactgcattacgcggtgcatggtcataccgctgccgagttgattacccagcgagctgatgccgccaaaccacatatggggttaacgacttggaaaaactccccggaagggaaagttctagccagcgatgttaccgtcgccaaaaactacctcacgaaagacgaattggccgatttaggacgaatcgttgaagcctatctaaacctggcagaatcacgtgccaagcggcatattcgcaccaccatggaagaatgggaagaattcctgaaccaagtactcactcttgatagtcgcgaactcctagacagcgccgggaaaatctccaagaaaatcgctgaccagagagccaaagaagaactggaaaaatatcgagtaatccaagacgtggaatatcaatccgattttgacaagttcgctgcgagagccctggaggccaccaggcaccacgatgaagctagatgatacacggtagagcgtgtaaaccggcagggagcttaggagtggggttcttggggcggtaatatcagggtatctgggaagtgttttcattggcgcgcaagggagagggctattagatgtcgcaacaacgcctgcaacttacttggtacaacaaggacaaggctctgattcctaccgagaccggcaaatacggctatacctgggttgatcctgcggatccgcgttactgtgaaacccacaccctggtctatgacgaatacgttgagggtaagcaaactcaaaagagtgaggagtttgagtattctgagcgtgccgacctagagccacaagacgataacctgctgattttgggagagagcggggacgtgctggaggcgcttacccgggtgccagagctggcggaaaaatatgtgggcaaagtgaagctgatctatattgacccgccgtttaacaccgcgcagactttcgccaattacgaggacaacctggaacactccgtgtggctgacgatgatgcgtgaccggttgctgcatttaaagaaactcttgagtgaggacggatctatttgggtgcacctagacgatgtcgaggtacacaggatgagactgctgatggacgaggtgttcggtgctgggaatttcgtggctgaaatatattggcaaaatacctacagccccaaaaataatggatcaggagtatcgattgattcagacgttattcttatctaccgaaagtcatcatcgtttgaggtaaataggcttcctagaacaagttcaatgaattctgcctatcagaatccggatgatgatccagcaggatcgtgggctaacgacaatccgcacgcgcgtcatgcagctggtaaatatcagcaccctggcgtgtatgggattcagcatccgattaccggtaaaatgctttatccctcaacatctgcaaattggtgttacgcgcaatcaacagttctagaaattatgcaagggtggggtgactatgtctatggggataacactcctgaggaaatggcaaaaagacgcgaaatagaaccccctggtgtgcaactacgtgatgatgtgcatccacttgttttgcggaactttaactcgtccagcgtgaaacgcgcacaggaaattcaagatggtggaccttggccagttttttggcttactagggacggtaagggagctattaggcgcaaaacctatctgtctaatgttgctgggcgtattccgcaaagtatctggccgtatagcgaagtcggacacactgacgaagcgaaaaaggaaaaccaatctcttttcccagatgaaactcctttctctacccctaagccggagcgtcttttggagcggattattcatattggttctaatccgggggatattgttttggattgttttgctggctcgggtactacggcggcggtggcgcagaagatggggcggcgttgggtgacctgtgagctggttgaggatacttttaaccgtttcacgaagcctcgtttagagaaagtagttagcgacagcgatccgggtggtatcactcgcactaaagggcagcgggtggatgctaccgatgagggtttacctgaggggttaagtgctgatgatgcgcagaagctaacttcgctgctcaataaggcaattagtgaaagtcctgatctgaagaagtcagcggatattcgggcagttaagcagatggtgaagactcgccgctcgaaagacgtggttaattggcgtgggggtggcggttttcaggtggcgcacttatcgccggcttgctttgattacgatccgcagttgggtcgggtgatgctgacggcggcggcgactgggcaggtgttgattgagtcggtagcggcgaatctggggttctctttgttgcatcccgatgatgattatgtgtttgacggtcggcgcggcaattctttattgaaagtggttgaaggggtagcaaccgttgaaatcgtgcattggttggcttcgcaggtgcggccgggtgagacgattgtgttggctgctaccagcgtgatggatggggtgcgacagcatttacggaaagcggtgaaaggttcacgggtggttgccgtgccggatgatgtttttccttacagcgcagggggtgagcggtaatggcggatcggcttaatattggttttgattccgacatgctggaagaaattagcgcccagtttgatttgcgggctcctaataaagaggcactgcgcaagctggtgtttactctcgatggggattatgacccggcggtgatgcaggtgttgaacctggcgaccggggtggggaagacctatttgatggcggcgtttgtggagtatttacgccggcagggtgtgggtaacgtgatgattgttacccctggtaagacggtgcaggcgaagacggtacagaatttctcgccgggatcgccgcgttatatcgctggttctggggtacctccgcaggtggttacgccccaggattattcggcgtgggtggctcgccagaatggcccggcgcagctggcttttgggcgcgaggtgcctttgttggcgtttattttcaatatccagcagttgattgcgcctaagtctgtggatggggatactcatggtggcactcaggatgcgatgcggcgcaagcctcgcaggtttgatgagagtgcgggggtgctttttgattaccttaagaatcttgatgacctggtggtgattgctgatgagtcgcatctttacggtgcgagcgcggtagcgtttaacgcggctcttaaagagttggatccggcagcggctattggtttgactgcctcggtagacaggaagacagataaggttatttttgagtatcccttgtataaagctattcaggataagtatgtgaaggctccggtgttggcgttccgcaagaatggctatggcgcggatgaggcatctgaggagcagcagttgcgggatgccttgcagcttcgccagattaaacagacctgttacgatgcttacgcgaagaagcaagagcgcgctcatgtgaatgcggtggcgttcgtggtgtgctcggatgtggagcacgcgacccaagtagctgatttgttgcgtaccccggaatacctgggtaaggctgatgcggtgttgcaggtggattctaagcatgaggacgaagcaactcagcgcctgcttgatgagttggatcggccttattcgccggtgttggcggtggttagtgttaataagcttaaagagggttgggatgttaagaatattgccgtggtggtaacgctgcgggcgatggcttcggaggttttgacccagcagaccatggggcgcgggttgcgtttgccgttcggcaagtatacggggatagggcagattgaccagttggatattatcgctcaccagtcgtttaaggagttgttggctgccgagaatgtgttgcagcaatttggtttggaagaagcggtagccagccaagatgtaggtagggtgcgtgtggctattggaagtgctggtggcgaaaactctgccgttcctgccggcgttggcggtgatagcgccagccagtctaccggggtgccggtggatactactttctcgtttggggagggtgcgggcgtgtttgcagggcaggaaggttcggtgccagttggtgagcctggggagcctggggtgagagttcgcactattagtgaatctggggtagatgaaggcccggtgttggagtcagttacgattacacgtaaccctgagtttgctggagtgagttaccagttcccggtgaccaccatttctgtttgcccaacccctattcacctgtcagagattagtgctgagcagatcgagcaggcagcacggcgggttacttctactggtgacgtgttatttcgtcaggaaatcgttgccgtgttaggtaagaaactaaaggctgaagatcgggaaagcgcggaagtagactcgcttcatgttgatgatgctgatgcccaagaaggcctggttaaactggtgatggacatgccgcttgtccccaagacaaaacaagacgttctctacgtatctgagttgctggttccaacgtttatgaaaggcgtgactttcacgggctggacggtgaaatcgctggcatctgcacgcgatgagttatacaacctggtgaaagagtatgtagatacaacctcgcgcgccgctcctacagagttagaaatacaccccaaaacgatgccgggtagtggatacaccttggagccaggtgaaatagtttatgaccagattgatagccgtgaacagttcgtacagagacgggtttataggggctggttcaagtcccttttcgctgaggaatcttttgattcttacagtggcgaatatgtactggccaagctgctaaatacttcaccagggatcaagtggtggcaccgtttgcaccggcaagatgaggcttttgtgcactacaactctaaagatcggtatttcccagactttgttgcccgcgacagtgatggcgtgtactggattatcgaaggcaaatcagaacgtggtcacgatgatgagcaggtgcaagacaaacggaaagcagcagaatcattagtgcggcgtttgattgccgaggacgcctacgaggggcaaaagtggggatacttaatcgcctacgaaaatgacaccgcccgcgcagattcctgggaagacctcaaagcctacagccaaccagtcaccaacgttatataactacggcagaacctccgtctaggcgacttccagcccaacagggtaacgccgtttttaaccactgaaaacatgtcaatatcagcggaaaacacctaaagaatatagagtttagaacatgaatgttccggtgcagtatcgatctttgctcgctcctcctgaaccgcgcgaacagcgctataaatacgggcgttcgctgcgcgaaaccgtcccctttagttccctggcggcctgggtgccgtcaccggatcgtgaccctatcgccctgattcaagactcccaccagggcagagtagaaaatctggttccgattcgggtagggcggatggcgtcctcgccctacggtttcttgcggggagccgccgtagtccaagccgccgactctgccgctctgcctgccaccggtatccaaccggtagtttgcggggactcccacctgggaaacttcggtttttaccgttcccccgaaggggaactggtaatggatctcaacgacttcgatgaggcgcataccggcagttgggagtgggatctgcgccgcctaaccgcttcgattcacgtggcggggcgcgaaaataatctttccgaacccaaatgcagtgatgccgtaatcgcctgtgtaaatgcctaccgggacgaaatctcttacctggcggggcgtcccctctttgagcgtgccttcaaccgcattgacctggataatctcaactcaagagagctgaacccgaaactggtaaaagaaatagaacgcgccgctgctaaagccgtgaagcgcacctcggatcgggtgctccccaagtttgcgcaagaagaaaaaggaagcctgcggattacccccgaacctccgctgaccaccagaatctctcaagatgattgggatgctttggcacgcgccctcgacggatacctgcacacgatttcaaaccagtgggcgcggatgctgggcggatacaccctggtagatatcgcgcaacgggtagtaggcgtagggtcagtagggctgcgcgcctatattgcgctgctacaaggatccactcccacggacgtaatcttcttgcagctcaaacaggcgcgccgctccgtgttggcgcaatatgtgcatggctccaaagaatggcactctcaccagggtgaacgagtcgtggaataccagcgagcgctgcaaaccgtgtcggatccgctgctgggctgggcgagcgtaggcgaacgccaatactatgtgcgccagttccgcaatatgaaaggaaccgtgcctttagatcgcctgggcgccaaatccctatgcgactatgcgggaatcgtggggctgctgctagcgaaaggacacgcgcgcacccacggagccgctatgattgccggctacctgggtaaatccgataaaccggggcaggctttagctgattttgcccgcgcttacgccgaccagaccgaggccgaccacgccgaattcttgcgggcaatcaaagacggacggatgccccaaccggagggcgaaatgtccagtgccttccgcgcgggctagggcgtaccacctgccgcgcgtgtcctagttcaccagcgtcaaaatagcatagcgagctgcggtgatgttaggctagtagagccgttacaagccggccacggatgcgtcatgcccgggtgaaactgccccggtgctccgtgcaacaagtagaagtaaaggagaacccagtggcactgagtaaagaagaaaaagccaagattatggaagaatatgcgacccatcccggtgatacgggttcgcctgaggttcagatcgcgctgctttccaagcggatctcggatctaactgagcatttccaatctcaccagcatgatcaccactcccgtaggggactaatgctgctggtggggcagcggcgccgcctgctaggctacctaaaagacatcgacatcgaacgttaccgttctttgatcgcccgtctaggtttgcgtcactaatatagaaatatcggcccggtttacgccgggccgaattgctatcacccaggtttcggtcttcggtggtggcctccggatagggcgctgcagtttctagtcgctaatctccgtgggtctcgatcgttgaccgcccatcgcaaggtgatagctctcaggagggcataggccctagaagatggaatacaaggagtaaataaaagaaaatgatggacgatccagaagtgattgcctccgaggcaatcatcgataacggtcgtttcggacagcgcacggtgcgcttcgaaactggcctactcgcccaacaggctgccggcagtgcgctggcttacctggatgatcaaaccacggttttatctgccactacggtaggtaaaagcccgcgcgaccagtttgatttcttcccgctgactgttgatgtggaagaacgtcaatacgcggccggacgtatccccggaaacttcttccggcgtgaaggccgtcccggcaccgaagcgattctcgctgctcgccaaattgaccgtccgctgcgcccctcgttcgtaaaagggctgcgcaacgaagtacaggtagtggaaactatcctgaccgtacacccggacgacgcctacgatgtgctggccattaacgccgccagcatgtccacccagatttccggtctgcccttctctgggccgatcggcggtacccgcatctccctaatcgatggacagtgggtagctttcccgcggttcagcgaaatggaacgcgccaccttcaacatggtggttgccggacgggttattcagaccgctgacggcggcgaagacgtcgccattatgatggtcgaggccggtggcggcgaaggtacctgggatcttatccagcagggacagaccgcgcctaccgaagatgtagtagctgaaggcctggaggccgccaagcccttcatcaaagaactgtgccgcgcacaggcgcaggtagcagccaagtgtcagaaggaaaccctagagttcccgctgttcaaagacttcgaggacgaacactgggatgccgtggccgaaaactgccgtgaacagctcgaccaggctgtacagattgctgaaaaactcgagcggcaagaccgggttgatgaaatcaaagacaaaatgctcgccgatctggaagagcgtttccccgaaggcgagaaagagctaaaagctgctttccgcgccctcgaaaaagagctaatccgtacccgcaccctgaacgagggtgtacgtatggacggacgccagccgaaccagattcgctcgctatatgcgcgcgccggagtgctgccccgcctgcatggatccgcgattttccgtcgcggcgaaacccaggtgctgggggtaaccaccctgaatatgctgcgcatggagcagcagctggacaacctggggccggagactcgcaaacgctatatgcaccagtacaacttcccgccctattgcaccggtgaaaccgggcgcgtaggcagccccaagcggcgggaaatcgggcatggtcacctcgcagaaatggcgctagagccggtacttccctccaaggaagagttcccctacgctatccgccaggtatccgaagttatgggttcgaacggatcctcctcaatgggttcagcctgtgcctccacgatttcgctgctgaacgcgggcgtgccgctgaaagcgccggtcgcagggattgccatggggctaatgagcgaaccgaacgaggacggcaccaccaagtacatgaccctcaccgatattttgggagccgaggacggcttcggggatatggacttcaaggtcactggtactcgcgatttcattaccgccctacagctggataccaaactagacggtatcccctctgacgtgctgaaaggcgcgctagcgcaggcgaaggaagctcgcctagagatcttgaacctgatcgaacaggcgattccggaaccggacgaaatgagcccctatgcgccgcgcatcatcaccgtacaggtgccggtagacaagatcggtgaagtcatcgggcccaagggcaagatgatcaaccagatccaagaggacaccggagccgaagttgtgattgaagacgatggcaccgtttatatttcctcctccgaggccgaatctgccgaggccgcccgggcagccgtcaatgcgattgctaacccgcaaatgcccgaggtaggggaacgtttcgtaggaacggtggttaagaccacctccttcggggctttcgtttctctgacccccggcaaggacggactactgcacatttcgcagatccgccgcctggtagggggcaagcgcatcaaccaggttgaagacgtgctaaacgttggcgaccaggtgcaggtagagatcgaggagatcgacgagcgcggcaaactttcgctaggcgcagtcctcagcgaagagcaagaagccgaactagccgaaaatgaggctaagcaggaatctcgccgctccgaggacggagatcgtcctcgtcgctcgcggaatcgtacccgtcgtcaccgcaacaatcgtcgcgacgaccgtcgcgacgagcaagcagataatgacggcgaataatcgctaagaacagttggcgagggcgagaatatctcgccctcgcctgcttttataatctagaaagtcattaataatgcgtagattcttagacctggtagtcgccggggtgggactgtttctttgtctgttttctgcccttgccttagtggcagtttctgcccatagcgaggcgggactgttgcagatattaaccgtattcctggcgttaatcttcgctgcggtagcctgcgcgtttctactggtgtttgcaggtctgcgcctagtctttaaacttgctccccgccgcttttgggggagggcgctgctagtggcgctaatagtcaccctagtcatcttgatttatgcgtttgctagcgggagttcccaagcacagctactgaccttggcgctggggatttttagcgctcttaccctgctgcagtttgtttgttctttcgcaataatccctgctagcagccagaaaaccacgaaagctaaagccagtgccgctcggagccataaagaaaaaccgggacgctaaagcgaatagactccaaacatatttaggggacaaattgcctgaaaaaaattattatgaactgccgctgtcagctaaagcgccgcgcctgcgcattaacgaaggtgaaaccctgattgagcgttcggtacttgcgggcggtattcgcctgattactcaacaggtaccggcttcgccctcggtagtgctgggattttggataccggcaggttcacgcgatgaaggccccgaccatttgggatccacccactacctcgagcatctactgtttaaagggtcagctactcgtgatgcccgggaaatttcgcgcgcattcgacgcggtaggcggggaactaaacgctgccactgccaaagaatccactcactattactgccgggtgctctcccgcgatttgccgatggcggtggaagtgcttaccgaaatgttggcgcgccccactttggcgcccgcagatttcgaactggaacgggcagttatcctggacgaactggccatgtcacaagatgatccccaggacgtgtgttatgaaaaattcctggggcagctttaccccacctctcctttgggactgccggtaggtgggactgcgcaaaccgtggctgccacccccttagaggcggtaaaagcccaccatcagcgctggtaccagccccaacatttgacagtggcggcggcaggcgacattgaacatgatcgcttggcgcagttgattttagcggcggccgagaaaaacggatgggaactgcccgaacaaacagatcccaaaattccccagcgtacccggccggagccaggcgctcactcaagctgcaccgtagaaaaaaccgtggaacaggggcaaataattttgggaacccgttccttgcctgcaaacgacccgcaacgtgacgccctaagtttgctgcttacggtactttctgggggaatgtcctctcgacttttccaagaaatccgggaaaaacggggactggcctactctacctatgcctttgactccgcttatagcgatagcggagcattcggcctctacgccgggtgcgcgcctacaaatctagcgcaagtaggacagttgctagcggcggaactagaaaaactcgctgataatcccgtcggtgagcaagaactttctgaggctttaggccagctcagcgggggagtgctgctgggcatggacgataaccgcgctcggatggcgcgcctgggacgctccgaagtcaacggagggcgcctgcgcactattgagcagctaaatagggcgcttcgggaagtaaccggagctgatattgctgttttggcagggcaattcctcggctcaccacaggtaaaagtcgtggtaagtccggcggtggcataagctgaacgggtgaaactaaagaaactttttccgattattgccgccgcggcgctgttgagcgcttgttcgccctccgcgcagtcgccctccacccatgagaaaagcaccaatcccaaggtgaccagttcggtatctaaaccggtgactacccctgccactccggaaaccccgacggtggcgttcacccccaaagataacctcagcgaaacgcagaactctttcgtaaaacaggttatggaaaagaaccactatgaccaacgcactgcggaactggtgctaggtccggtgcagtcgctgtgcggtttgctagataccaagcagccagattctgccgccaataaacagactttgtccgatatctacaccaaggttgattctgctgatctgcggcaagaatggtacaacaatctgcaaatagcggggcaaacgatttgccccgataaagcggagattattaacgccaataaacccgagggcgtgaactagatggcagcaaaaatcgcggttgcagtagtgggtgctaccgggcggatggggcagactacctgtgaagccattgaggactccgatgacctgcagttagtggcgcgcttgggcagtaaagaccagatcactgccgaaagtttggcgggagccgaggtggcagtggagttcaccgtccccagcgccagctttgctaataccgcggcgattttgcgcgccggagcccatgcggtggtcggtacttccgggtgggacgaggatgcacaggtaaaaatcctggaagtggcgcgcgaaactggacgtaacgtgctgattgcccctaactttgcgctctcagcggtgttagtgatggcgttttctcgactggcagcaccgttctttgcctctaatgaaatcgtggaaacccatcatcctgagaaattggatgctcccagtggaaccgccctggcaaccgcgcaagaaatggcggcggcgcggcaaaaagcgggtgtgcctacagctcccgatgctactaccaccgacccggagggtgcgcggggtatgaaagttggtgacgtggggattcattctctgcgggtattgggcgccaatgcccaccaggaagtaatcttgggtaatcccggcgagcagctgcggctgcgcaccgactgttttgatcgttactcctttatgccgggagtgctgctggctgtccgcaaagtcggctccgcccagccgctgacagtcgggctggataaagtcatggagttagggatctaaagtgacgctgtcacctgccgctcaagacgcagtgcgtttggcgaaaagtgaagatatgccagcgtgggggcaaatccaggcacaagccatgcacgcggatctgcaatctcatctaggacaggtcggcccacaaaccctagcgctgattgatcccggtgaaatcgctagagcctggcagcaggcgctggaaaacccgccctccccaaaacatcacctgttatcggcagtatccggaactcaggtagtggggctggcagcgttggcgcctgcccccaaaatgctgtttaaaccgaagcagtcgcccctggctgacaagaatgccgatgccgaaatcgtggctttagaggtcgccgattgggaaaacaatctggcagatgcctcccgcctagtaaatgcggttgccgatatgctgcgcctatccggggctagccgagtacagatttggttagcggccgaggcagccgaaaagatccgtttcttttccgaatgtggattcgcgcctgcggggctgcgtcaaggtttacaagtaggacacgaatctatggtgcagcacctgtggttcactgatctttaaccctttccgcccgtttcctggacggaagcataatcgccaagtgggggcaggtagagtagaaccatgagtaatgcagagcacacttttcggttagcaggtcaggtcggggtagcgatggctaccccttttcacccagatggcagcgtagactatgatgccgccggaaacctggcaaaacacctggtagaccagggtgttaataacctggtgctgtctggtactaccggagaatcacccaccacccacctagatgaaaaagagcaactgattaaggttgcccggcaggcagtgggggacgatgttttcattaccgccggtgccggctctaatgacaccgaacattcggtgcggatggcgcgtagtgcccaggaggcgggggcagatggaatcttgctggtcagcccctactattcgcgtccctcccaagaaggtctctatcaacatttcgcgaaagtggcctcccaggttgagctaccggtaaccctttacgatattcccggacgcaccggggtggctatcagtgatgacctgctgaaacgtatagctgaaatcgaaaacatcgtggcggtcaaagacgccaccggcaaagtagaagtaggcgcccgtcgcatgaatgaaaccgggctggcttattactccggtgatgacggcctcaactattcctggctcacccatggcgcggtgggggtaatcagcgtggttggtcacgtagccgcccccagctaccaaaaaatggtgcagctggtagaaaacggcgactaccagggagcattacagctttccctagaactagaacccctggtgaaagcgctaatgggagggggacaaggggcagtcatggtcaagcacgccctcgccctgcaaaaagtgatcccctccgacaccctgcgcctgccgctcgctccggccagcgaagaggaaatcgcgcagctacgtgccaccctggaccgcttcggtctgctttaaagttttttgggacgccctcctcaccacccttagcgcataggacgttcggtagagcttacccttagggcttcttcccggctacctgccaccaaaggactattccagtcctagtgcgcgcgcaagtttgccataggggcgcaaagccggaacaattagaaacgtgaatccgctttatcctgaacttcctttaccgccgaagctgaaagctggcaccatccgcgttgttcccctgggaggtctgggggaagtcggacggaatatgaccgtaatcgagctgaatggcaaaatcctgattgtcgactgcggggtgcttttcccggaagaaatccaacccggagttgacctgatcctgccggacttttcctatctaaaaggacgcatggatgacgtagtcgcgctggtgctcacccacggtcacgaagaccatatcggggcggtgccctacctgctgcgtctgcgcgaagacatccccatctacggatctaaactgaccctagatttcctgcgccccaaactggaagaacatcgcctaagtgcggctcatctgcatcaagtcagcgagggtgagcgtatagaactagatattttcgcttgcgaattcttggcagtcacccactcgattcccgatgccttggcggtcatgatccgcaccaaagccggaaacctgctggtcaccggggactacaaaatggatcagctgcctctagataaaagaatcaccgacctgcgcggttttgcgcgcatgggtgaagaaggcgtggatttattcttagtggactccactaacgcggaagttcccggctttatcgcacccgaacgcaaaatcggtccggtcatccgccaggtgctatccgaatctaccgggcaagtaatcgtggcctccttcgcttcccatgtgcaccgagtgcaacaggtgctagatgctgctcgcgcagtagggcgcaaagtgtgtctatcggggcgttctatggaacgcaatatgaacatcgccgcccaagccggatacctggatttggatcccgaagtagtagtgggcatcgatgaaatgaaacagctgccccctaagaagcgggtgtggatggtaaccggttcccaaggcgaacccatggcggcgctctcgcggattgcccaaggtgagcaccggtttgtgaccttggaaccagacgacacagtgctgttggcttcttccctgattcccgggaatgaaaactcggtttaccgggtgattaacgcgctgatgcgccaaggggcaaatgttgtacataaaggtaaccgcgcagtacatgtttccgggcatgccgccgaaggggaactgctctatacctacaacattgtgcaacccaagaacgtgatgccgattcacggagaaatccggcacctaatcgcgaacggacggattgcgcaagccaccggggtgccagaagaaaacgtggctctggccgaggacggggtagtagtcgacctcaaagacgggaaagcccaggtagtcgggcaagtcgattgtgaatacgtatatgtagatggcggatccatcggggagattgatgaagatcagctaaaagatcggatgactttgggagaggaaggcttcgtttccgtatttgcggccgtggatctgcccaccaagattattgcggccggtccccatatcactgctcggggaatggctgaggacgagggggtattccgcgaggtgctcccggacgtgaccgaggcgctgcaacgagcattaaatcagggcgatagcgatccctatcgtctgcaacaggccatgcgccgcgcgctggggcgttgggtggcgcgccgactgcgccgccgccccatgattgtgcccgtagtggtggagatctaaatggtattagctagcaaagaaaaactgaatagttcgtggcgtcagcgagttcccgcctggataggttgggtctataccattgcggctctgttctgcctagtaatgattcctctacgctataccgcaggtagtggcttcgggcaattttcgtttctggtactaactactctcggggtgccatccaccgccacgttaagcactgcggtgctattggctttcttgggtctgctctgtttttctcgcaagcgaatcggagttatcgtcctcatcgcgctgcatgccctgcacgccttgctgtatctagtcgctctcatattttctttttccgacccggattctggcccgacagaccagataatcttcgggttgcatgtggtgataggcgcgctgattctagctatcttattcgcatcagcgcgcagtttctggggaaaaatcaacttccaatccgcctggaaagccattgttattttgttaagcggacaactgctggtgttcgggattgggttcgccgtagctcggattatcgcccccaggagctgggtaaatagcccgctggcgctatgggtttacgggcgcatgtccggggtgcctttacatcgcggcctcaatatccacttcgcctttgcccatcagggagatttccgcgtcctcggtttcttcatcatgatgctttctggcctggtgatgctggttgcggccaatcgtttcatcctggggcaacgggcaaaagcccgcacgcgcagcgaagatctggctctccgcgccctgctagtaaaatggggtaaagatgattctttaagttactacgcgacccgcgataaccgggcggtggttttcagtgacgatggtgaggcagcagtttcctacggggtggcgttgggggtggcgctggctgccggagatcctattggagatccctccgaatgggataacgcggttaaacgctggaaagaatactgttatcgccaaggttgggtgcccgcagtaatctcggtcagcgcccaaggcgcacgcgtctatcgccgccaaggtctaaaggttcgcaaaatgggggatgaagccatcatcagtcccgaccgttttgaacgaaactccagtgccggacgcgcccttgccgccgcacaaagaagagtggcgcgtgcaggagttgaaatcgagattaggcgacaaaaagagctttctcccgccgaattacgcgaagtagccatgagcgcggagctgttccgccggggcgatgagcgcggtttttccatgagcctagatagaatgtttgcaccccaagagggcgaacaactaatcgtgactgcccgcggcaaagatggaaatttgcaatgcctgcttactttcgttccctgggggcagcgggcggtatcactcaacttgatgcgccgggcagaaaatgccgttaacggggtagtagaagccatggttttaaccctgctgcaacagggttcggaacaaggcatcgaacgtttttccttgaacttcgccatgtttagggaagtttttgtggagggcgaggcagtagacgctaccattaaccgccggctcaagcgggcaatctttgtgaaagcctcgcgggtatggcagctagagtccctctatgaatccaatgcccgctacaaccctaaatggttgccgcgttacttctgtttcctctccgatcccatggtgcctttagtgttgatagcggcgggaatgctggagggattcgtgccggctcccgctgccgccttgcagggggaacccttcgattgggaagtaaatagtaagtatctggccgagttggaagcactgcgcagcgaatatacggccgccaagttacaggtgaagctgagcgaacagcagcgctcccggcgcgtcaaagctgaaaaacttagtgcggcaggaatagagcccttcccggcaggttttgatttagggatccccttacaacaggcaaaaacccaggtagatacggctcaggcggggggagagcgcaaagagattcgcacattcggaaggattgtggcccggcgaaatcacggaggcgtggttttttgggatttgtactcccaaggcagctacctgcaggtggtgctagaaaaacagcatcttagcccgcagcaatttgcagctttacgcctgcttgacctgggagatttgctagtagttagcggcaatactggagcttcccgcaacggcaccccctctttaattgcccaaagttggacgctggccgccaaagcgctgcgccctatgccgcaccctgctgcccgcctggacagtgctactcgcacccgcgaacgcactatgactttgctgaatgatgctaccgatttgcgccgcctgcaggcgcgttcccgggcattgagtacggtacgtaaagaactgattgaccggggattcctcgaggtagaaacccctatgttgcaggcagtgcagggaggagccaatgctcgccccttcatcactcattccaatgcctaccaggtgaacatgttcttgcggattgccccggaactgtatctaaaacggctggcaatagcgggtatgggcgcgattttcgagatgggacgctctttccgtaatgagggcgcagacgccactcacaaccccgaattcacctccctggaggtctataaagctggctctgactatcgggaaatgatgaccctaacgcgcgagctttaccaggccgcagcccgagcaatccacggtaaagaaatcgctttgcgtccggtaaacgcggaaggcgccgcagctagcagtaatgacccggaattagtggaggtggatatctccggtgagtggcgggtgatctcggttttcgaggcagtgtcccaggcagtaggcacctcggttacccccgacaccgatgaggaaactttgcgggcattatgcgcccagcaccacctcaccccgcctcccggtgccaccagcgggactctaatcggcagtctctacgacgagttagtagaggcgcgcacggtagaacctactttctactgcgattttccggtagattcttctccgcttactcgccggcaccgcaaagacccccgcctagctgaacgctgggatttggtggctttcgggatggaactgggaactgcctattccgaactgaccgaccctcgtgaccagcgggaacgctttactcagcagtccttagcggcggccgcaggtgacccggaagcgatgagcctggatgaagacttcttgaactgcttggaactaggaatggcgcccctgggcggattgggactaggaatggatcgcatggcaatgatgctgatgggatgcgatatccgccaggtgctagcgttcccgttcgttaaaccgcgaaattaataaatggtttaaggtggaacagatggcagcagaaaataacaagttagtttcggtagcagcggtggtgctgaccctgcccttaaccatggcgcagctacccgagcggggcaccaccgtcttgggtaccgcgcagcgtccaggagtaggggaggccgccgaagtaatgctggctgctgcccgccagggagtgtcggtagttaatatgtcctgcctggggactggccccaactccacccaggcgcgaaaagtgctcagagaagcaaatatcagaaccgaaacggtagaagtagtcggcgatatcgggatgaaaatccagatgattgaagccgctggctactatgcatcggtgcttactgccggggtagaagtggatatttccagtcgggaactcagcaaggttgccatgaaccccggggacgtggtttatatttcagcgggggatctggcacacgcctcctatcgcacggcgctggccaattggtttcccactttgcccgagcaggtaaaggtagttatggcagcaactccccagatttcacaaatcgaaccgcgccacgtttccgaggttttgccccatgtggatgtgctgacttgcaatgaacacgaggctcgcttcctaccaggatcagttggctaccttagctgcgggtatgtggcggaaaaactacctgaatctgcctgggtagtagagagaatcggatcgtacggtgccaagttaattgatgctcagcgggaaaccatggttccctctatcagtgtgaaagtcgctgacactttaggggtgggttctgcccataccggggtgttgttggcggaactggttaaaggacaagaacccacccaggcacttgccagagccaatgtggcgggggcgttggcagccgggaaaatcggaaacgatacctgtccgactattgaagaaatcgatcggcgtattagcgaagttaacatttatcgctaggtgaatcagttaagagctaaactgcgttgaacagctattttaggtggttacggcgtggctgtcggcctcttttaaccctggaaaggtaaagtgccagtgttatggtagcgagaaaaaatagcaagaaacagaactccggcgccccgctgaatgatagttcgcgggtgcgcgatggggtagctttcttacttattgccctggccactatgtcggcgctaaccgaatggttctctatggacgccctcgctactcgcgctttgcatcacctagcggcgggactactgggcatttacagtattattgctcctctacttttagtttgggcggcgattagcctatttcgtaaccgggatccggaaaactcccagctgcatattttactgggcgcaatcgggataggagccgcgttaaccggaatcacccatgtagcctgttctagcccggctatcagcgattttatgacgatcgaaaaatcgggcggtatcttggggtggctatttgggcacccgctgcagattctagtttccccggtaggcgcggtaatcctgctgctattgttgggactatattctttgctgattgctactaatacttctctggccagtgctttcgaggcggtgcgtgccctgagcaagcgaattaaagacaagatttctacgggtgaagacgattcctcgagcgaagaggacgccgccggaacgggcagtgaaagcccggaggacgaggcacctcccacccggcggctgaagcgttgggaacggatggcggcggctacagaaaatcaagaccaagaagaaaccgagcccgctaccagcgttttaaccccgcaagacgcgtcctcgaaaccgaaaacaaatgggcgaaccagccgcttgaaactgcctgctgacgcggaagaaaccgaggtgttaagtcagggcaaacccgcagctaccgggaaagataataaagaccagtccaacgagcaaaccgcactgttattgccgggtgccggtaacagcggcatgaaactggctgatggacaaacctatgagcttcccggggaggaactgctggtcaaggggaagcctcataaggtacgttctcaagctaatgaccgggtcgtatctgcccttgaggaagtgttcgccgagttcggggtggatgtggaagttaccgggttctctcgcggacctacggttacccgctacgagctggaactggggccaggggtaaaagtagagaaaattactaacctcaaaaacaatattgcctacgcggtggccagcgcggatgtacggattttatctccgattcccggaaagagcgccatcggaatcgagattcccaatactgaccgggaaatcgtggcgctcggcgacgtgttgcgctcggcggcggcacaccactccacccatccgttaatggtaggggtaggcaaagacgtagagggtggatatgtagttaccaacctggcgaagaccccgcacctgttagtggcgggagcaaccgggtctggtaaatcgtccttcgtaaacgccatgattacttccctgttgatgcgagccacccccgagcaggtgcgcttgatcctagtagaccccaagcgggtggaactcagtatttaccaggggattcctcatctaattaccccgattattaccgatcccaagaaagcggcagaagccctggagtgggcggttaaagaaatggatcaccgctacaacgatatggccaactttgggcataaacatatcgattctttcaatcaggccgtgcgggaaggggcagtagtgccccctccgggatctgaaagggaaatcaacccctacccctacctgttaatcgtggtggacgagttggccgatatgatgatggtcgctccccgcgatgtagaggcttctatccagcgcatcacccagttggggcgggcagccggaattcacttggtagtggctacccagcgcccctcagtagacgtggttaccggcattattaaagccaatattccctctcggctggccttcgccacctcttcaatcacggattcgcgcacgattttggatcaaggtggcgccgaagccttaatcggtcaaggtgactccctctatctgccggccggaacccctaaaccgatgcgtatccaaggcgcctgggtgggcgaggacgaaattcaacgggtcgtggacgcggtgaaagcgcaggccagtccggaatatcgcgaggatgtaatcgttaaagaagaagataagccgaaagttgctgaagatattggcgacgacctggatgacctgttggaggcagcacaactggtgataaatacccagttgggttcgacttccatgctgcagcgtaaactgcgggtgggatttgcccgtgccggcaggttaatggatctgctggaatctcgggaaatcgtagggccttctcagggttctaaagcccgagaagtgctggtatcgccggaagaattacctaaagtgttggccatgttgcgaggagaaaccccggcggcaccggcagtggattcttctgtagacgatggcgccgggagtgcagaagaacctccgttagaggaagtggaagccgacagtgatgaggacgcctgggagctaaccggacgctaagcacctataatccgttttaagagcgcagaaatctattagggtagtagttgatggaaagcaaagagaaacccgcagcttcttcggaaacttggcggaaaaaaatcccgaacctgcttacagtgttgcgcattatcctggtgccggtatttatcgccttgatgatcgcgcagtttctgcaggggacagtaaccttactgattattgcgctagtggtattttgcgtggccgcctataccgatcatttagacggcaaattggctcgccgctggggggtggtcagcgatttcgggaaactggttgacccgattgccgataaagccctgatgatttcggctttcgttttactttctctttttcagaatctgtggtggtggtttaccgcagtagtaattttgcgagaggtagcggttaccctgctacggatgtatctgctgcgttcaggagtggtattacctgcctctaagggcgggaaaatcaaaaccagtctacagattttaatggtcttcttgtggatgctggccggaatttgctaccccttcaatactcaggtgggcgtagtggttatgtatttggcgatagccgccctaatcgccgcgtttgtcgccacggttctttccggaatggtctatttcctggacgcccatgacaaccataaagagcaagcgaaaactgccgacgatcaggataagtctgcagaggcagacgaatccgcagcggaggaggactccgaagaaacggacaaatctgctgaagcagaccttgctgcggaaaaggacgagcaggctgcggaaaagcccctaaagcggcggcgtagaaggaaaaaccgtgcccacaagcacgccaagatcggtaaaggcgcggcagagctcaaatcgaaggagaaagccgcggcagtggacgcagacggggaaactgactctagtgatgagggcgcagaagaagaccaagacctgatcgatgacttcgcaggttttaaaaagacctggatccctcggaagaaaccgggtgaagtcaagcccgagaccgataaagcggcggaagaaaccgccacggtagagccggtttcagtagcagaaaaatctgcggacgatagcaaaaacgcccccaaagtcactaagagtgctgagagtgcagaaaagacctcggtaacagcgggcggggagcataaagctaagttcccctcgcgcagacaacggcgcgagcagcaaaaagtccaggaaaataaggacgcagaagcagagggagacttagccgaggaatcctcgaaaagttctatcccgcaggcagtggtaaatatcccggatccagctgccagtggcgctgcagctaagaatagtgaagacatcctcgcagatgagaataatccggaggaagaagccgatatcgaaaaaagtcccgagctgaaagataaggccgaggggtcccgttttgcttttagtcgctccgagatgcggcgacggaagaaagaataatagggtagccaaataggtcactagggtgtgaacacccgcacttttttcgcttaagggaatgaaaaaatgggtagcggtgttgaaataagcgtgaatggaagagagtatcgaaggaagagctcggtgggcagttccaagcctgtgggtgtccagccaagagggggatatgctatggatatgacggaaaagaacgcagggaacaagactcccttgctacgcgaagagatcggacaagttttgcggatggtgcgccgatcccaggggcgtactttgcgggaagtttctaccagtgcccaggtgtctttggggtatctatccgaggttgagcggggacaaaaagaggcatcttcggaactgctgtctgctatttgtaaagccctagaggtgccgatggcgatggtactgcgggaagtgtctttgcgggtagctgtggccgaaggtctatcagtgcgccgccaggttccggaagtaccggtacattcggtagtttagccaggtgaaacggtctgaattcaacaacgccctgaaagctgtctttgggcaggctttcggggcgtcactactttctgatctttatttaccagatttgcatgctactccggtcgaagctttagcccaggggaaagatccccagcaggtttgggatttattgcttgtgcaaacagatagtgatcccgacttgcgtttcattcaccgcgctgaccggcgcgctttaaatgaactaatgcgaaaagggctgctcagaggggatgctggcgaatttaactccgggaagtaattcggggatgccgggatttttggggagggcgcaagcagcttagcgcttcgtttatcttcgttttgttctttcccggtgtttcatttgtcgaacatctgttcgctaggtagagttgtacccagacgcgcagtaaacgatatttccccaagggattatcgccaaactgtaaagcgtatttggccatacgtagcgttagcttggctcctcggagaggggaaccccaagccagaaaaccaggccagcctattaaccgttcggagagaaccagagaggatcgaaaccatggcaaagaagaccgcaaaacggcaggtaaatgcaggcggaaatcgcgagcaagctctagatatggcgctagcggcgatagataaacagttcggaaaaggctcagtgatgcgcctgggggaaaacacccatcgccaggtagaggtgatctctactggttcagtggcgctagacattgccttaggggtaggtggcttgccgcgcggacgcattgtagaaatttatggcccggaatcctccggtaaaactacggtggctttgcatgcggtagcagcggcgcaaaaagccggggggaatgccgcttttattgacgccgagcacgccctggatcccgaatatgccaagaagctcggggtaaacaccgatgagctgctagttgctcagccagacactggggagcaagcactggaaatcgccgatatgctggtgcgttccgggggaatcgatattttagttatcgactcggtagcagccctagttcccaaagcggaaatcgatggggaaatgggggactcccacgtgggactgcaggctcggttaatgagccaggcgctgcggaaaatgactggggcgctttctgccaccggcaccaccgcaattttcattaaccagctacgggaaaagatcggagttttcttcggatccccggagaccaccaccggtggtaaagcgctcaagttctatgcctcagtccggatcgatgtgcgacgcattgaaaccttgaaagactcctcgggaccgattggttcgcgtacccgggcgaaagtggtaaagaacaagatggctccacctttcaagaccgccgaatttgacttgatgtatggagagggaatttctcgcgaagcctccataattgacttggctaccgatctggggattatccgcaagtcgggcgcctggtacacctacgagggtgaccaactggggcaaggtaaagaaaacgtgcggcaatatctgaaagataatacggaacttgccaatgaaatcgaagagaaaatcctcaaagcggtgggcattattcaagaggatgatgctgaggacgccggggaatcagctggagatatcgccaagtaacctgggctaagtcaagatggttaaatatctcgatcccgaaagtgattttggagcccctcgccgccggaaaccaaaccagaatctggcggcgaggcggcaaaaaaatgcggagcttcctcgctcagaagccctcgaagcggccagggaatccgcattgcgggtgctagatcataccgctgcctctagcgggcagattcgcgaaaaactcaccaaggcgggtttcttgccggagattaccgaagaaattgtcactcgttttcttgaagtggggttgctagatgaccgcgaatatgcggcaatgctggtgcgtacccgttttcgggaacggggattagtggggcgagccctcgtccaagagctaaatcggaaagggatcgcccccaatctgcagcaagaagcattagcgcagattacccctgagcaagaggtggaaagtgtccagatgttggcggaaaagaaagctcgttcgctgggcaatgctacctatccgcaggcaatgcggcggataggttctttcttagcgcgcaaaggctactcgccggctcaatgtcgcagcgcaaccaatgccgccttggccgatagagattttgaaaccgaatagacagccggcactcgtgccatgatggaagtatgaatcaagaactagatgcgctggcgcgccgcctacaagaaattctccgtgaaaacagctatacgattgcctgtgcggaatccttaaccgccgggctggtctgcgctactctctgcgatattgcgggcgcctctgaggtggtagccgggggagtcaccacctaccagactcgcactaagagcgaagtgttaggggtttcgcgttcccgcttacaggaaaccggagcggtagatccggtggtagcggaacagatggcacaaggagccgcgaaattattttccgccgacgtcgccctcgctactaccggggtggccggccccggcagtcaagatgggcatagcgccggtaccgtgtttatctcggtaactacccctgccggaggcgcaaccacggaactgtcgctatccggggatcgtaaccagattcgcctgcaaacggtggcggcagtgctagaactggctattggggctttaagctaagcgcttatttatgctggggattcctcaggtaacctagaagcgtggcatacgattacgaagagcaactcggcaaggcgcaaactaccctagagaagattcgggcggttacggatcccgaaaagttaggtgctcaaataaaagagcttgaaaaagccagtgtagatcctaacctgtgggatgatcccgagcatgctcagcaagtaacttcgcagctttcgcatctaaaatctcggctcgaccaggttgaacgcttggatcaaagtgttgaggacgcccaaaccctaaaagctatggcgggggaagagttgggtagcgaccgggaagaagtattaagtgaactgcgctctctgctagagaaattaaataaagaattagccgacctagaagtgcaaaccctgctttccggtgaatatgatgagcgccgcgcagtggtcagcattcgctccggagtaggcggagttgacgccgccgattttgcggaaatgctgctgcggatgtatctacgctgggcagaacgccacggctaccccactcaggttatggatacctcctatgcggaagaagcggggataaaatcagctactttccaggtagacgcgccctacgcctatggcactttatcggtagaggcaggcacccaccgtttggtacggcaaagtcctttcgataaccaggcccggcggcaaacttcctttgccgcggtggaagtgattcccctgattgaatccgatgaccatattgagattccggaatcagatttgcggatcgatgtgtttcgctcatctggtccgggtggacagtcggtaaatactaccgactcggcggtgcggatgacccatattcccactggaatcgtggtcagtatgcaaaacgagaaatcccagattcaaaaccgggcagcggcgcttagggtgctgcagtcccgattattgcagttgcgacacgaggaagaacaggcgaagaaaaaggaactcgccggagaagtaaaagcctcctggggggaccaaatgcgttcctatgtgctgcacccttataagatggtgaaagatttacgcactttagaggaatcctcacaggtagacgcagttctggatggagatattgatgctttcttggatgcggggattcgctggcgaaaagctcaggaagaaagtgagaactagcacgtcaaggcactaagccccccttaatcggcgtgtgagcgcaaatggcaagcccctaggcgctaagttggtcagtgccggaagcttccaacacatagtaggggatgcatgattacttttgacgacgtgtcgatggtgtacaagcggggagcccgccctgctctagaccatgtgagcaccaatatcgaacggggagagtttgtgttcctggtgggtaaatcaggttccgggaaatcaactttcctgaccatgatttatcgggagaatcgtcctacccatggaaaagtgacggtactaggtaaggacgtgggcaggctgtcccgctggaaggtaccaaagctgcggcgccagattgggactgtgttccaagacttccgcttacttgacaacaaatcggtgcaggcgaatgtggccttggcgatgcaggtgattgggcggccgcgtcatgctataaaaaccgaagtgcctcaggtgttatcactggtggggttggaaggcaaagaaaaacggatgccctatgaactatctggtggtgagcaacagcgagtcgcgattgcccgcgcgatggtcaatcggcctgagatattgctagccgatgagcccaccggaaacctagatcctaaaacttctctaggaattatgcggctgctggaccggattaatcgcgccggtaccaccgtggtgatggcaactcacgatgatgaaatcgttgaccagctgcgcaaacgagtaatcgagttggtagatgggaaagtagtgcgcgaccaggatcgcggcgtgtacggatcgagtcgtagctaggagaaaaaatgcgtttgcggtttattctcggccgagtattttccggtctgggacacaatatggcgatgaccatttcggtggtgctggtaactttcatttccctgctgtttgtaggggtgggcggcctggcgcaaatgcaggtggccgcgatgcaaaaggaatggtacgccaaggtcgaagtgagcgtatatatgtgcgctcaggatgaccaagtagcgaactgtaatggtcaggcggctactaagcggcagattcaagatgtcaaagacgaattagatcggggtaccctgtcccaatacgttgaccattacgagttccaaaatcaccaccaggtgtacgcggatttccaaaagcaatatggcgacaccactttgggggaggccactaaacccgagatgttgccgcaagccttccggataaaaatgaaagacccctctcagtacgagatcgtttctgcccagttatcggggcaacctggggtagaacaggtacaggatcagtcgcagctagtaaaaccgttaatgaatcttttcagtcaatcgatgcggatttcctggggactggctggggtaatggcgattgcggccatcctgctgattgtcactactattcggctttccgccatgtcgcggcagaaagaaaccgagattatgcggatggagggggcttccgggctgtttatccagctgccctttatgattgagggcgccctctgtgcccttgtcggtgcgctgctggcctgcggagccttattcgcgggggtgaaatacctggtgcagggatggctgcaaaaaactattccctttatccagttcgtgaacctgcgggaggtggcgattctttccggaatgattgtcgctgctgccttgattatttcgatcgttgcttccattgcttctctagctaaatacgcgaaggtgtaaccatgttttttaggaatcgctttggaaaagtagccggcaccgccctgttgacgggggcgctagtgttcgccggtgccgccggcactaccatggcttctgatcgcagcgaccaggttagtaaagaaaaggcagcctccgataaagcagccaagttacgctcttccttggagggagtaagcgctgatttagccaactcggtaatcgccctcgaaaatgcgaaagacgcccaaaagagcgctcagggagcctatgatgaggccgtgcgggtacaagctggtgcagcgcgggaacaagcccaggcgcaagaccagttggaagtagccactgcccagctgaaacaggtagaaaaagccttagcggcttcgcaggaaagagagagcgaaaaccttagcaatatcggcaaggtagcacgcgaaacctataccaatccttccttgggcggtacttttgagttctttatttccgataagaatagcggtgatttaagcacctacgcgcgcaatgcgcagctggctgcccagatgcaatctgattccttgaaatcggtacaaaaccagattgtgggacaaaagaattcccaagcggaacaacgggaattaacctctcaggtcaggaagttaaaagaacaggcagacgcggctctgcaggctgccgatggtgctaaggcggataaagagaccaaacttgaggagttaaatcaaactctggaagaaaagaaaaagcaagaagccgaactagatgccaagaagggcgagatttctaaacagctagcggaagctgaaaaagatcagcaggcggcgcgtgagcgaattatgcagattgatgcccaaaaccgcagttctcaagctgctagtagttccagcagtgccagtagcggcagcgccagtagcggaaacgcgggtagcagtagcgctggctatatggcgggaggaatcttccaagctccgattaaaggccccttgcacctaacgtcaccgttcggataccgaattcacccggtgaccggacagcgtcgtctacatatgggagctgatattgcggctggctgcggattaccacaatacgcggcggctaatggcacggtggtttctacccgctatgaaggcactgggggaaacacggtcactattaaccatgggatgctgggaggcagttcctggatcagtgtttaccgtcacatgacgcagttcgctaccagtcccggggcgcaggtttccaaggggcaactcatcggctataccggggctaccggcagggttaccgggtgccacgtgcatttcgagctctggaagaatggaacggtaataaatcccatacctttgccgtagttttttgcgatagcgtaggaacgctatgagtaagaaagataagagtcgcggcacccaaggtaaaagtaatgccggggtgcagatgattgcgcgcaataaaaaggcgctgcatgacttttttatcgaagatacctatgaggccgggttggtgcttaccggcaccgaagttaagtctttgcgcatgggcagggcttctttaagagagtcctgggtagagattgatcgcggggaagcctggctgcagcacgcccacatccccatgtacattaacggtacctggtcgaaccatgccccgctacgtaaacgtaagctgttgctgcaccgtcgggaaatcgacaaactcgcagctgattccgcggcgaaaggctacaccatcatgcctttagaactgtatttttccggtgggcgggtaaaagtaaaaattgcgcttgcccgcggcaaacaagagtgggataagcgccagaccctacgtgagcagcaagataaacgcgaagctcaaagggcgatgaaaaattggaatcggcgctcgccccttagctagggtgcaggatactttggtaacccgataaccagggaaagaagcttagctattttccgtggcaccgcgggcaaagccgagaagacatacaaataactctctgttactcgcttccgggaacgggcaacagagagttattagttttggtcttttagcttagaaggtgcggcgggcacgagccttccggcggcgcatgctgcgacgctcatcttcgtttttaccgccccacactccggcgtcctggttgttgtcgagggcccacgccaggcaaatcgactctacctcgcagcgggcgcacaccatttttgcgcgctcagcttgggcaatagccggaccggtgtttccgattgggaagaagagctcggggtcttcttctaggcaggcagcgcgtgaacgccaatccatctgcgtctcctttgcaggttaacaataagtatcgtgtttgcgggtaactgcccgcacagaacgctgtcttggcgggcagctcctttgctacttactatttttttagttaacggcagataaatcaagggttttaacagatcagagttgagttttcgcgtgcaacgtgtcacaaaagaagaaaattttagcaaggtttagcaaaaatagccatttggatggctaaacctttaccatctttgaccagcattcctcgtccgggaattaaccctacctggtcggggagcgcctggtaatcaacgcctttcaagaaaggacgacactgggaagcactacctagaactatcaaaatcgctcgctgtcgcagttccgccagaggaccggaaaaagttgtctgcagcacctggggactgacgctggcaagcaccattgacgattctgtgctatctcttcctggctctaggttggaagctacatccggcatcgatatatcaaaggacagctccggatccgcagttagctggctccagcgggaatcgtgggagcttaagtcctccagcacttgatgctgaggcataaaggcgttaagtaactggacggcattggttttcccggtgccgctttccccgataactaaccaatcgcgctgtaaatcggattcctccaggcctattgctcccgttaacccctgggcaaaaatgcttgccagcttgccagactttaggggaggtggaagcgaaaaacaagaggggagggcgcgaagacgaagattaggaagcttcacaaatttttctgggcagggggcaggcgcctcggctgcccggaagggagtagctttcccaccaggagaaaacacaaaaactcctgctccgctaatctgttccaaagcttgtgggctgaaaccggcctgcgctgcctggatactatcgcggatccctcctactacctgggtttttaacccctggaaaatacgcgaagacgccccggcgggcccggacactatcagcagggaaatccctagagcttcactttgtcgacacagccccgctagcagatcactaccggagagcgggccataggcgcgttctaaagcatcgagccagtcttcacagtcatcaataatcagggttccacttaaccgaccgctgctggcgcgttttagcacctcgaagctcacttgtgggctcctggcgatagtccctggccaggttttttcatgatgagcctgaaaagaagggccgaaaaactggcgggcagaacggcaaataacgtggacttcccgggcgctattggccagctgtagcgctaacattaaagctaaggaggttctaccagaccccactgaacctactaggtgcacagaaaatggtaacggcagggtcaaaggtgcggttttctggcgacgcggataatcacctaaccccaaaacaacttttcccgctcctgctggcaactgcgataacccgattcgggcagggagcggcggagcccaaggaaaatgcggcaggcaggtaggcttccaagccgctcgacaccatttggcaatccgttctgcctgacttacctgcggaatccaagcaaattgcaccagttttccgctggcgtcgagggctgattttatccaggcacggccaggaatagccggcagctctgcgcaacgcccatcgcctaccacatcgcaagaatcggctgcttccaacactcgcaaacaaatccgcagcgccatattcgacttgatctgtccatcaactatgcccgcagggcgttgagtagccaaaattagatgaatccccagcgagcgtcccaaagttgccaatcgaatcaaagaatcaagcaaatccgggtgatcggtcgccagcacccggaattcatccaccaccactacaattcggggatgcggcaggtttttgtgctgctcccggtacttgatctcggcgttaagcgacaagatggctcgcctggtgagcgccggttccaggtcagttaaaatccccagcacatgcggcagagcttgcaatttgctaaaagcatccccgcccttatagtccaccagcacatattgcagtttgctgggtggatgagatagcgccatagaaagcagccaggtagtcagcgccgccgattttccggctcccgtggttcctgccagtagggcgtgcggcccgtccttgattaaatccagatagctgattccgtgggcgtcccgtgccaccggagctcgcagagactgagactgtttccagttcgcagcaatacttactaaaggattgccagcttccatgaattttggccatagctgctcaaaagtaacttcatcagctagttgcgcctgcctggaggtttttccggagtcagcaaggaggtggcaccaggccaaggagggtaaatccgcgtggcgagtagcgcgcctatgggacgggacttgcacaatccgattcgcccacaccgccgcctcgccgggggtgtctgcccaggtgatgcaaatatcgttcccgtttgcttgcggttttttcgagggggaaaccacgattactctcggagattgctggttgctttccgaagcactaaagtcttgggaactccccgaaacgaaaaggtcctccttaaggttctgatctttagctttatcggcatcatcaacaagatggtcgctgtcgacggttaaatcggtcggatgcagctgcaaatctaggtgatagcgggagctctcctgccacgccagttgtgccgcccaccatagggcacgctcgcgggcatagataccggtaaagcaaagtttatctcccgggagggcgcgcactactttatgggggctaatccaggctgcaacctcccgggatgcgggttcggtggctgctagggatgcagcggaacgttttggctggctggctaccagtaatagttgtgcaggagtcaccgggcgggggcggcgatacagccagatacccacagcaccggcagctaaggctactatcaaaatcagtccccaaatccggggaatccgcagcagcgaagcaagagaaataggtaagaaaatcagcattggcaagaacagccactgtctccaagaggaaactcccgatcttggatgcggggagggcacggttaggcggtgaggccggggtgaaacctttagaacagtgttacctgctctaatacgtgaggaagtaccgatttcttgttcaaatcgcagccgagaaaagaccgtggcggttttgccgcggaaactgccattgcgagaacccagatccctaacccgcagtcggccgttcctggagataaaaagtagatgatcgcgcgacacctctcgatcggcaagttgttggcgaccgatactgcaatagctacctttcaggggcagcaccaagccggcagcagggccgcgctcgacctgcaaatggcagggagctgccagggcttgccgcaccgattccaaactcacctggttaacctagccttaaaggcagcgcggttgcgaaagtttctggtcacctgtggaaaacttttgcggcgcggatgctttttcttttctgaataaaaaggggaaaatgaagccatggcgagcgaatacgaagaggcattggcacaggcgcaaaagcagtgggaagacctggttgctcagattaaccaggcgcgggttctctactatgaccgcgatcgtcccacgctttctgatgctgcctatgaccagttgtttcgccagctagaagaactggagggacgttttccgcagctaataaaccccgattcgcctactcaaactgtaggggggagcgcgcaaaaaacgttttctgcggtcactcacctggagcggatggcttctctcgatgatgtgttcgatactgaagaggtctctagctggtatcagcggatggcgcaggcaaccggggaagaaaatccgcaggtgagcgcggaagtaaaaatcgatggtttggcggtcaatcttacttaccggaacgggaacctggccatcggagccactcgcggggacgggagcgtgggtgaggacgtgactgccaatatccgcactatcgctaacattccccaaaaactaagcggaaaggtcgtgcccgagctttgcgagatccggggggaaatctattttccgctggcagattttcaccgcttaaatgaacagcgagctggctggtgggaggactatagcgaagctaagaaagcgggggaactgcctgcttggcgcgcgcagcgacaaaaagcgggactgcccaccaaggtggagccccctttcgttaatccccgcaatgctgccgccgggtcgctgcggcaaaaagatgcccggataactgcggctcgcccgttagcgttgattgcccatggaatcgggaaagtgcagtggaaagaggcagatttaactgccggttttaccccgcccaccacccaattgcagtggtatcaccagctttccgagtgggggctgccagtcagcgaatatacccgcccgctgcggggtttggataaaatccaggagtttattacccatatcggtaaaatccgtcccgagattagccacgaaatcgatggggtagtgctaaagattgaagacctgaaaactcagggggacctcggctttactgcccgcgccccccgttgggcagtcgcttacaagttcccgccccaagaagtccacaccaagctgctagatatccgggtaggggtagggcgcaccggcaggataaccccctacggagtaatggaaaaagtactggtagatggctcgaatgtggagcgggcaaccctccataatcccttcgaggtacgccgcaaaggcgtaaaaatcggggatacggtggtgctgcgtaaagccggggatgtgatccccgaaatcgtctgcccggtagtggatttgcgggacggcagcgaacaagattgggaaatgccggggcactgtccctcctgcgggagcgagattcgccctgaaaaagagggggacaaggatctacgctgccccaatcagagacattgccccgcacagatcaaagaacgtcttattttcttagcttcgcgcggcgccctcgatattgaaggtctgggggagcagtccgcggcggcgctcactatgcctgaggctgagcgcgaacgggtggcgcttgccctcacccaaggtgcagcagcagcggtagcgggcaaatatgtttattgttccgaagcggacccggctgctaccgagccatcggaagaggccaagtcgctgctaccggcgcccgctgctcccgcgctcccgctagaggccggggtattcgatttagatgctgggcagctattacaggtaagaatctggaaccaaaaacaggtgaccaagggggaccgggagacgcttacagctcagctagtggccgccggcaaaaataaaaaagaggcagcagcccttagccgcaagctgctgcagagtggccaaatctgggcttatgctgcctatttcggatctggagacccgcaggccgccaccttgggggcacgcggaaaactcttgttggaggaattagaaaaagcgaaaacccagccgctgtggcggattttagtggcgctttcaattaggcatctcggtccgcaagcctcccgggcattagcggcgcggtttggttccctgcaggcgatagctagcgccagtgaaaatgagttaaccagcgtagacgatattggcgccgaaattgcctcctccataaagagctggttcgcgattgattggcatcaagaaatcgtagctgcctgggaaaaagcgggggtagttatgcgcgaggagggcgccgcaagcggagagcaaaccctttccgggctaaacgtggtggtttcgggacgggtagagggttttacccgggacgaggctaaagaagcggttatgcgggcgggtggaaaatcggcgtcctcggtatcgaaaaatactgaccttttggtttacggcgaaaaggcggggtctaaactgaccaaagcccgcgaacttggggttgcctgcctgccgcaagagtatttttcgcagcttattgagcagggactggaggctacgcttgcccaagccgggcaaggaggcgggcaagctctggaaaccccgaactcctcctcgtcggtgaaaatctcaccttctggggaagaagaatttacggagagtgctgatagccttttctagcgtttgttctgcgaagcgcctcggctacgcgctagagttgttaccatgttccggatcccgaagaaaacgatcccgccgctgctgcgaggtttgaaaatcgcaagtgcggtgattgcaacgctgcaggccattacgatttcggtcatcgtgtcgattgaccagctgcgtaaactgcggcaaacgggtaaaccgggtggttatcctcaggttgataatgaaccgctacgcgtggatcgttcccgtctaaaaacctatacggatggggaaactctttaccgcgatatgctggcggccattgatggcgctaaagagcggatattttttgaaacttttatttggaaatcagacgaaattggtcagcagttcaaagaggcgctgattcgggcagctaagcgtggcgccgaggtctacatcatttgggatcactttggtaacctggtcgtcagtccgcgtttcttccgctttcctcgcctaaaaaacctgcacgtcctgcggtattcgctgaagcacacggcgcgtgaccaccgtaaaatcatggtagtggactccaaggtgggattcgtaggcggatataacatcggctcctattatctggagaaccagtggcgagatacccacctgcggatcagtggccctaacgtgtgggagctagagagcgcgttcctcgacttttggaactatgctcaaaaatggcatttacggctaaagaaagtgcgagacccgcgcgccaagtcttggaattcaaaaatccaagcctgcgttaatgacccgaaacgcctgctatttccggtacgcggaatgtacgtgaacgccttggataaagcgcaagaatccgcctatataacttcggcgtatttcgttcccgatcgggtaattcagcgttccctcatcgatgctgcccgccgcggggtagatgtaaaagtactggtaccagcaaaatcaaaccatattattgcggactggatttcccgttcctatctgaccgacctgctcgataaccaggtggaactgtggctgtacgacaatgtgatgatccacgccaagaccgcagttatcgacggatactggtccactattggcactgcaaatatcgaccggctatcgatgaccgggaaccacgaaataaatatgtcaattacttcccgcccgttagcggcaactatggagaatattttctttactgaccttttaaatgcccgctcgattagccgccacgagtggaatcagcgtccctttatcgcccggatagcggaacgacttttacgtcccttggccttcttcgtttaggcgggacgcacccgggctccggggcgtaatatgaccgggagtgccgcgggcattagactggggctatgtcgacaattgatagggatgaagtagtgcgcgtagccgctttggcgcggatcgcactcactgatgaagaaatagaccagttcgcgggggagctggggcagattgcggcggcggttgccaccgtgtccgaggctgtaggtccagataccaaagccacctcccacccgattgaaatgagcaatgtgctccgcccggatgtgccaggaaaatgccttgaccgggaggaactattggccggggcgcctttggccgaggatggccagttccgggtaccgcaaatcattggggaggagtaaccgtggaagactttttgaaactttcagcgctgcagctagcagaaaagctgcgtggcggagaactaacctccgagcagctaacccaggcttgcctggatcggattgaacagttaaacccggagctaaacgtatttgtgcatctagatccggagggcgccctagaaactgcccgccgcgtggatcaggctcgtaagaacggggaagaactccatcccctggcagggctgccgattgccttgaaagacaatatggttactcgcggccaggaaactacttgttcctcgaagattttggctggttggaagcctccctatgatgccacggtagttgtaaaaatcaaggatgcggggctgccgattatcggcaaaaccaatatggacgagttcgcgatgggatcttccaccgaacattctgccttcggccccacccacaacccttgggatccatctcggattcccggtggctccgggggcggctcagctgcggcagtcgcctccttcatggttcctttagccttaggttccgacaccggcggctcaattcgccagcccggttcggtcaccggcaccgtaggcgccaaacccacctatggggcggtttcccgttacggtctggtagccatggcctcctccctagaccagattggtccggtgacccgtacggttgcggatgccgccgcgctacaagaacttgtgggcgggcatgacccctttgactccacctctttggatgagccggttccggctttgctagaggcggttaaggaataccaaggtaaaactgatctatccgggctgcgcctaggggtagttaaacaagccggtggagacggctacgaagaggacgtgacccgcgcctttaacgacacggttgcggctttgaaagagcggggagctacggttactgaaatcgatatgccttcctttaaagatgccctcgccgcctactatttgattatgccggcggaagtttcttctaatatggcacgctttgacggtattcgtttcggaatccgggtggagccgacctcggggccggtgactgcggaaaccgtaatggctgctacccgggaagccgggttcggggcggaagtgaaacgccggattattttgggtactcacgtattgtctgccggatactttgacgcctattacggcagcgcccaaaaggtacgcactttggtgcaagaagactatgccaaggcgttctcgcaggtagatgcgttggtgctgcccacttcgcccaccgtagccttcaaactgggggagaagattggtgaccccctgaccatgtataactgcgatattgccactattcctgcgaacctagcggggatcccggcgattagcgtgcccatcgggctggatcatcagggattgccgattggattccaggtgatggcaccccagcgcgccgacgccctgatgtatcaggtagcccaagctgcagttgatgcctgcggcaccgacgttccggctgcttgcccggtgaagtagaggagaagcaatgagcgacttaatgaaatacgaagatgcagtagccgagtttgatccggtattggggctggaagtccacgtcgagctaggcaccaaaaccaaaatgtttgatagcgcccccaattcttcgctgggtgaacccaacacccgggtaaccccagtttcggtggggttgcccggatccctgccggtagccaatgagcgggcagtggaatacgcgattaaaatcgggctggcactgaactgcgagattgcacctttctgtcggttcgcgcgcaaaaactatttctatcccgacctggcgaaggcctaccagatttcccaatacgatgagcccatagcccatgacggatacgtggatgtagaactcgaggatggggaaatcttccgggtcaatattgaacgcgcccatatggaagaggatgccggcaagaacacccatatcgggggagaagccggccgtatccaaggcgccgcctattccctggtcgactataaccgcgccggggtaccgctggtagaaatcgtttcgcgtcctatcgagggcgcaggagctaaaaccccgcaggtagcggcggcttatgtgcgcactttgcgggatattttccgggctttggacgtttcggaggcgcggatggaacgcggaaacgtgcgcgctgacgtgaatgtgtctttgcgacccagccccgatgcgccgctaggaacccggactgagaccaagaacgtgaactcgtttaaggccatcgaaaaggcggttacctttgagattcgccgccaggcgaagattctttctgaaggcggtaaagtaatccaggaaactcgtcactggcacgaggatagctcctctacctctgccgggcgggaaaaatccgatgccgaagattaccgttacttcccggaaccggatttagtgccggtggctcccgcgaaagaatgggttgaagagttgcgtgccaacctgccggaactgccggtagccagacgccgccgcctgcgcgaagaatacggtttttccgatatggaaatgcgggatgtagtaaacgctgacgcattagatattatcgaggccacggtagcagcgggtgccgcgccgcaggctgcgcgcaaatggtggatgggggagatttcccgcatcgctaaagaaaagaatctggagctcgaaaaggtagcggccactccctccgatgtagcgcagctacaagacctggtagaccagggcaaactcaacgacaaattagcccgtaaagtcattgccggagtacttgaaggcgaaggcacccccgcagaagtaatgaaagcgcggggactcgaaatcgtgcgggacaccgctgccctccaggccgcagttgcccaagtgattgcggataacccgaaagtggtagagcaaatcaaaggcggcaaagtcaaggcgattggcgccctcatggggggcgttatgcgtgccaccaaggggcaggctgacgccggtgaagctcgcgaaatgattcttaagcaaatcaacggctaattcccgtattttgcgcgggtactacttgcggggtatgcgccggggcggatttcgcctcccgccctaaaaactggatgtagatactacgtacgcgcgggggagagatttttcctcccgcccaagaattcggaaaacgtagcgacgttttccgaattcttatgcccaccgcacccactcggataaaatctctcccccgcgcttatttcggattattctcgccgtccgcatcctcttgctaagaccggtctgcagggttcactcggataaagtcttttctccgcgctacaaaggcaaacacaaccgtaattttggactaaatgaggctcgtttccgcggtaatccccgcttcataaggcatgggtaactggcgtaaatttcctgcacatgaaacgcaaacgcgcgagggcggatttatgccgagcagacagacttcacatcgatagctgtcagattcggaaactcagtcttcagttcttgaaacctataagtctccgggcgtaaaactcgtaaaagaccctggtcttttgcgagtttttgggcaggaggcgaaatccgccctcgtgcgtacgtatctacacggagtttgggcgggaggaaaaatctctccttcgcgcataaatccgcccccgcgccttcgagaacctcgctgctactgggcgattgctgttaacgcctgttggtagacttgctggtcttctgggctgaaacagcagataatgacggattttagggtggagggggaggcggagaagtcttcgatttccttgagggcaatcgcggcggcctgatctatggggaagcggtagaccccggttgaaatcgaggggaacgcgatagaacggcagtgattttccgcggccaggtgtaagcagttgcgccaacaggatgctagctgatcggcttctcggctacctcctccatgccaaaccgggccgggagtgtgaatcacgtatttggcgggcaagttgtagcccccagtaatcttggcttccccggtgcgcgccccacccagcgtccggcattcttgcagcagaccggggccggctgcgcggtgaatagcgccgtctacgcctcctcctcccaagagggaagtattagctgcgtttacaattacgtctacttctaaggtagtgatatcggataaaattacctctacctgcagttttcctagttgcatttcattagtccattatctttgattgagcagtacccaaagggattcttttctaggtagcgttgatgatattcctcagccgggtaaaagacgggaagctgagtggcagtcgagatttgggtgactggctcggcgccgtagaggtctaagattcggtgtttgaattctaaacgcactgcctgagctgcatgttcttgagccgcagtagttgggaaaatctgggagcggtattgggaaccaacatcgccgccctgacggttacgggtggtggggttgtggtgggagaaaaatatctcgagcaactggaggtaaccgacttgcgcagggtcaaaatctacgcgtaccgtttccgcatgaccggtagtgtcagtacaaacctgctggtagctgggattctcggtacttcctcccatatagccgaccgcggtttggataaccccggggatgcgcgcaaacaggcgctctgctccccaaaaacaccccatcgcgaaataagcagtctcggtagttgccatagtttcagtatagggggagagaagtcgctacttccggtagtagtcaggtatttattccaaaaagtcgtcggtaaccggaattagctgcgggtatttggggctgcgcccgtctccggaggagcgtcctcgagaatggcgttttacccaaggccagagatgatcctttgcccaagcaatattttccgaggcagcaaaacggtctttgcccgcagcagccggggtttggtagtccggatcagcaaccgactgccctaatgcttctagggcggcgttcatcattatccggtgtccttctccggttagatgtaagcgatcgggcgcccacagggcagtatcgcgaagcgagcggagcccccattgatctatcacatagcatccgtggcgacgcgcaagcgaccaaagattagagttgaagacagccaccgtagacctagtaagccccaatatcggggagtgatgcggatcgtattgggcgcaaagtattacttcgatcccctgcgaacgagccttgaccaccatttcttctaacagctccgtcactttatctgccgaagaaccgggacgaatcatatcgttaccaccggcaacaatagataacagcgccggtttcatcgcgatggcgacgtctaattgttcctggtttacctggccaataagttttccccgcaccgccaagttagcatatttcagaggctcccggccggcggaaattcggcgttgagagagttccatagccaagcggtcagcccaccctacgtagagggggtcgtcgctgtcatcttccagggggtcagtcattccctcggtgaaagaatccccaatcgctacaaaactatcccaaggaggaatcaccggggatgctgctttattgtccttatcagttgtcttcacgcttccagcctaagcgccaagaaaactatctgcaatggttacgtagaactcgaaaatgggcattagccacccgaaaccatcagggcggggaataaaaaatatcccactacctggggcagtgagatattttttccggcaacgcaccttaaagtgtcgctgccaggaagttaaacgctagaaaagcggttacttctccatggagttaaccagcttcgccagtttcgacttgcggttagccgcctggttacggtggataatcttcttttgcgcggcgcgatccattttctggctggtcacgcgcaattcagattctgccaactggacatcgccagctgccaccgcttcgcgggtacgacgtaccagcgtcttcagctcggactttaccgagcggttacgcaaacggcgcttttcgttagtacgattacgcttcttctgagacttaatatttgccaatttttcactctctatgagtactaatattcggtccagagggctgagccggattcggactggcgtgtggggcacgctggcaagaaaccggcaagactaaagccgaccggggctaaagtccgcaaatcagtctaacaggcacgcagccgctagcgctaaaaaaatcggcggtggtaatcaagttcacttccccagccgtctccaaagctagtttttgcgcctttagtgaggattgcggcgtcctcgctaacggttcttgaccgctaaacctgactaaactatccctccaacgcttcttaacgccgtccctgattagggttgcgtccgcgcagccgatccaactggcgccgttctttcttggtcggccgcccactgccggcatcgcggcgaggcaaagccggcagggaaagtttcggaagccgctgcggagttaaatcctcataggctaaacgtgccaaaggatagctcaccctgcgttccagcagttgtttgacctgcaaaatatggtcaaagcccccgatacgcaccactacctggtcacctagccgtaccggagaagatgccttggcgctttttccattgattttcacgtgtccggctttacaagccttggccgctgcggaacgggttttatatttgcgtactgaccacacccaaatatcggcacgcacagagccagcattagcagttccggcgacttcgccctcgccgcgttcttcggttcccatctggtttccgccgctcctcaagtcactaagtcctaaatctcccggtttttacggtagttttctatttttcattctagaggttagcgcttctactccccgccgtgggcgcaaatggcgtaaccttagaggagaggattattgccccataggggtgttgaggaaaggaataaattggtaccgaatccaattcccgctgccaagttgcccaatgggcgggttcctttgaacattttggagcttgctccgctgtctaccgggatgacccgcaaagaggcgctggatacttccctaaacctggcgaagaacgctgaccgtttgggttacacccgactatgggtggcagaacaccatggttcccaagtctttatgtgttcggcttcgtcggttatcatcacccgcgccttggaaaacactactcgcctgcgggtaggtgccggcggggtaatgctgcccaactgggcgccgctgacagtggcagaaacctacggaacgctttacaccatctatgacgggcgcgtggatctgggactagggcgcgctcccggcaccgatccggctacggccagagcgctacaccggggttccagtgagcctgcctatttcgaggaagacctagaggagctcgccacctatctttcggatcaaaaatcggtggttcactccggggtagtttccggggcagaagcctcgatactcgggattgaagttatcggtgtggatcgcccctatactcgggtacgcgcgattcccggtgaaggtaccgccattcccatgtggatgctttcctcatcttcggccggggctaaagtagctgctgacctggggatgccctatgtgttcggcgggcatttcgccccctacaacgtcgatgaggcgatcgagatttatcggcgtgagttcaacgcccaagcccccaccgccatggtggatcatccggtagtgatgatgggaatgaacgtgatgtgcaacgaggacgaggcggaagccaagtaccagttcagcactacccaacaggtgcagggcaatgtgctttcaggtcgtcccggtactctcactccgcctaccgatgatctggatgctactttgggtgaaaaactagctaatcgggtgcgggcgctgccttctattcacgcggtcggtaccccggagcaagtagtcgaaaagatggattgggtatcccgtaagtacatggtggacgagattatcaccgttactcacgcctatgatccccaggtgcgcattcactctctagagttggtggctaaagaatggggactgccgattttgccagaaaacggcgaagaagaggccgcagaaccagcctcccaaaccccggaacccgaagtggtagaggttaaagaggaaaagccggaagaaaaatcggagccgcgagctgcttctcgcaatcgtcctgccgtctacgggccggtgcatcgcagcgagcgcaagaagcctgtgctcaagggtacggccacttctgcagctaaaactgcagctagtggtgaggatgcggaaaaagctcccgtaaagaaagctcccgccaagaaaactactgcccgcaagaaacccgctacccggaaaccggcagcaaaaaccactactaaggcaaagccggcagcaaaaactgccgccaaggccggggcagacaccgacaagacgactgcctcaggtaagagcaccgctcgcacccgtactcggcgcaaaccgagtgctcgcagttagcgttcggtgtccctaggcaataggatggcgccgacaaggcacccagatttaataggaagaaaataggattggctaatagcgatcgggatttaggaatcgcccccgctaatacggatccccagcggattcgtaacttttgcatcattgcccatatcgatcacgggaaatctactcttgctgaccggatgttgggggataccggggtagtttccgaacgggagatgcgcgaacagtatctggatcgtatggatattgagcgcgaacggggaatcaccattaaatcccaggcagtgcggatgccttggcaggtgggtgatacccattatgtcctgaatatgattgacacccccggtcacgtggatttttcctatgaggtatcccgctccctagctgcttgcgagggcgcgattctgctgattgatgcttcccaggggattgaggcgcaaaccctcgccaacctgtatatggcgatggaacatgacctggtgattattccggtgcttaacaagattgaccttccagcggcgcaaccagagcgttgcgccgaggaaatcgcgggcctgctcgggggctctcctgaggactgcctgcgagtttctgcgaagaccggggagggtgtgccagagctacttgaccggattgtggccgaggttcccgcaccgaaatctgatagcagccaggcgcgcgccctgattttcgattccatctatgacacctatcgcggggttgttacctatgtgcgaatgatggatggcaatctcaaaaaggggcagcgggtcaagatgatggccactggatccgaacatgaacttttggagatcggggtgatttccccggagcccaccccggcggagggtctggggccgggagaggtcggctacctgattaccggcgccaaagatgtgcggctgtctaaagtcggtgatacggtaaccagcgctaaagacccggctagcgagattcttcccggctatcaagaacctaaacctatggtttattctgggatttatccggtagatggggatgattttccggatttacgcgaggcgctagaccgtttgcagctaaacgatgccgcgattacttttgaacccgaaacctccgtggccttggggtttggtttccgttgcggatttttagggctactgcacctagagattgttaaagagcgcctggagcgggaagcgggactgtcgattatcgccaccgcgccctcggtgatttatcaagtcacccaggaggacggcacggaactggaagtcactaacccttccgaatacccggacggaaaagtcctggacgtgcaagaaccagtggtagaagctaccgttttaaccccgaatgattatgtggggcgggtaatggagctgtgccagggacggcggggcaccctggggaaaatggagtatctgtcctctgatcgggtagagatgcattaccgattgccgctagcggaaatcgtgtttgacttctttgaccagttgaaatcaaaaacgcggggctttgcctctttggactatcacgaggccggtacccaatccgctgacctggtgaaagtcgatgttttactaaatggtgatgtcgttgatgccttcagtgcgatcgtgcatcgggacgcggcctattcctacggggataagatgacgcggcggctaaaagagttgattcctcgtcagcagtttgagattccggtgcaggcagcggtaggttcgcggattattgcccggcaaaccatccgggcactgcgcaaagatatgctcgcgaaatgctacggcggagatatctcccgtaaacgcaagcttctagaaaaacagaaggccggaaagaaacggatgaaagcggtgggcgcggtggaaatcccgaactcggctttcatcgaggccataacccaagatactcccacgggaaaggggtaaatcatgagtgaggaaatatctgatcgcgaagatgcgatcgcagatttggattcgggggaggaactggtagctggcgacaatggtgacagtgccgctgattttgacctgtcctctccggaagggcgctatatggctcggtcaaagtcgtttgtgtcgcgggcgcggcagcttagcgattccctacaacatacttgggatgcgcatgccagtgaatatgtcctagaggtaccgactggggcgggctatacggcggtggctgaggacgccaaaccgctatcgtttaagcgaatttttgaccgcaactcggtggtgcgcctagaaatcggaactggcaatggggatcagattgtgtctgcggcagtttcccaccccgatcgtgactatatcgggttcgaggtttaccgcccgggagtagcccaaaccgtatcgaaggcggttaaggcgggggtcggtaacctgcggattatcgaggcggatgcggcgcaagcgttgccgattctgtttccggaaggctccctcgatgaggtttggactttcttcccggatccctggcggaaaactaagcaccataaacgccgcctagtgcaggctccgtttgcggaaactgtggcgcgggtgctgcgtcccggcggaatctggcggctggccaccgactggtcggactatgcgttccagatgcgggacgtaatcgaaagctccccctatttcgagaatccctatgcgggcgttaatccccatgaggaagatccggatccgggtcgcggcggcttcgcacctcgttgggaaggtcgagtaatgaccaagtttgagcggcgcgccctagatgcgggacgcgaagtatttgacctggtggcgcagcggctttcgtgagcggaaccgccaagttacaggaactgttttcggctgctagtgccggcgaaagctcgcagtcttccccgatagcgagggagggcgcggcgcgctctgatttggttcagccggcactaggcttcgcggtctatattcatgtacccttttgccgggtacgctgcgggtactgtgacttcaacacctatgtgaacggttttggagctggcgcagaccgggaaagttaccacgattccgcgcgtaaagagctggcgctggccgcggggtttttagatgaaaatgagttagttccgcccccggcgtcctcggtttattttggcggcggtactcccaccatgttgagcgtgggagcgctgcgggcaatcctggaggaagtcgcggacgcctggggaatagctccgggggcagaaatatccaccgaagctaacccggacactataactgaccaggtagcgcaggatttagcggccagcggatttacccgagtgtccttggggatgcaatcggcactgccgcaggttctggcgactttggagcgtactcaccgcccagaaaatgtcccgcaagcagtggcggcgctgcgccgagccggactcgcagtttctttagatctgatttatggcactccgggagaatccctggccgattgggaagtatccttgcgcgccgccttagccttggaagtggatcatattagcgcctattctttggtgattgagcccggcaccaaaatgcacgccctggtggagagggggaaactacctccgattaatcccgatagccaggcggaaaaatatcaggtggcagacgcactactcagccaggcaggttttgaatggtacgaaatctcaaactgggcgcggcggctagacagcgaaaaacttcctagccgggaaatcccggacgcaacttttctggcgaatgtatcccggcataacctggcttattggcgggactggaattggtgggggatcgggccgggcgcacattctcatcttggtcaggtgcgttggtggaactgcaaacatccccgcgcctacgctagccgcgtagccgcgggagagcttccagttcaagacggggaagtggtagctgctgccagccgggaactggagcggattatgttggggctgcgcaccgcttcgggggtaaagcatttgacgccagcggaaggaacccggctatcccgcctggtggaaaagggatatttgcaggcagaggcagcaaagaacggtcaggcggtattgactttgcagggtcgcttgatggcagattatgttacccgtgaactgctgggctggtaactagatagcgactgaatctgaaagttaaaagatgaaatccggaagctaacccggttaagctgaaagcgatgaatcatttttaactttaaggatcttcccatgaataaggccgctagttcccccacaggaaaaccagctgagcaagctcccgcgagttatccagttcaactggttccttcaccggaatgcgcccggaaccaccaaacacctcccgattatttacggttcttgacgcagttcccgcatctgcatgcagatttagctttgaatccggcattgccgccagatttagaacagtggattaagggacacccggatccgcgggtgcaaacgaacctgcggatccgggtgcaaaatcctgtggctccggctgctgcgaacaatagtccgctaaaaagtgctggttcctcggggacagcttcagaagaacagaaagatgaagataaatttgatgcgacttcgcttgcgggttcggtgccaccagtaaccaagtcaatgcctccggaaaaagaaaccccaccgcaggctaaagcaccattttccccagctgcagtgcccgcagcgccggggaacccctcatcggtaccgtctacccaggttctgccgcaaccctcggcgtatccgcagaggatgcctgccgctgcttacccgccccccgcttcctatccgcagagctttcccccggctggttccccgggatatcagccgcttccgggacagtatccgcgaccccgccgtaagcgccggtggttaattccgttgattgctgtaatagcggtgctggcgattattgggggagggataggcgcttattttgctttcgcggggtttaagcacgtgggttacgattccccagaagagctggctgatgccttgaaagcttcgcttgatgaatctgatttgatagggattgcccagatgagcgcgcctagcgaggatgtcatcgttgaggacgctttacagcttgacgaagatctacagaaatatatttctactgctgattcaaagtcacagggagaaagtggaagtttgatggataaggtttccgacctgaccagcgtgatgcagaatctggaactagatacttccggtttaagtagcaaggtcgacaatctgagtgatgatatttcccggcttaattattcgggaagaattgatgtaaaaataaaagatagagataagttaaaagctagcttagataaactattttttgataatcaaagtgctccggaaaaagaaaagaatttaaatgggattttagacaagtttaaggacatggaaaaagatggtatcgagctaaaatcgagatatccctatagagtgatggcagttaaggaagatggtaagtggtattactcggttcccatgactttttttgatagcaagaattacagtcctgatgatagtcgctacgagaacccacactatgatgtcaactgggtcgatccgggggagacacctagcgatagtgggcagtttgcgaaagagctttcgggagctattacccgggtaagtaaccttgatgagctaacttctgaagactgcatgcgtttccttgatatgccggaacgtcgcatagtgatggtttatgcttccccggaggctaaaggagatatgagcccggggatggatcttaaaattagtttatccgaagataaaaagagttcctatggcttcgcttttgatttagataatttaactattgatgtagatgacatggggtgggagattacatcgggagagggaacctattccgatcaagatggcaagcaaacattagattttggggattatgttaaaaatggcaagttgcaactggtagctaaatcaacaaagcagggactaaaactatcattttccggtagtcttgccaacttttttaataacctagattatgatttggggaatgagtatttccaggaaaataaggacgaatacgatagagattacgagaggcaaatagaggaagatcctttccagaggccctataaaaaactcattctgggataccgtggtttgggtaaaaaagtagatgcagagacggatcgcgaagaatacaactacgattagggctacgactacggcgactaggacagttagcgggtgccggcggcggtaacgaaatcaattagtgattccaccggccctaaaagaccgggttccaggtcgcgccagtcgcgtactttccgcaatatatgtttccaaccctgagcaatatcggcctgggttttagccggcaagcctagcgcctgcaggcttcccactttaatatcggtgcctcggggcacttgcggccaagacgctagccccactcgctgcggttttactgcctgccacacgtctacgaagggatgccctgcaatcgcgactgcgtcctccccaaaagtagcgatacaacgctgggcaatgcgagattctttagagccggtcaccaggtgatccaccagggctccgatcctttcgcgcggggtgggagcaaactctgccagccgttcttccagatggtctaccccctcaagaatctctaccactacccccagctctcgtaaatcatcgccccaaacgtgttctactagctccgcgtcgtggcgtccttctacccaaatccgagaagcccgtgccactcgcgcccgccgtttaccatcttgcggcgtgcggcgagaaccggagttagtagcggcgcgaccgctcgccaacgtaggcgcctggtcattcctgctagcaggcgaaggaactcgcagctctaccggctgcccgtcaatccaaaaaccggctcccagggggaaagctcgcactttgccgcggcgatcctccagctccaccaggtacatgccgccagctttatagcagcgcagcaccgctcctacaaaaccggtcatcacgtcctcaactaccaggccgcgggtagcggcaaccgggcgagaagcaggaagtttccgccaatcatcattagcgaggacgtcttttccgtagcgatcaaacacgccctaactataagggaagagcctaggcactacaggctaccgccccggcagagtctgcagattcgccgctgccggaataattaggatccaaggctgccgcctcttcgggactcacccaagccggcaatttgctcaagcgagaaagatactcgctaatggccgcgaaatcactcaaaatctggggattcacagaagatgtcacctggaaaaccacaaaggcgcggatatcgctttcgacgggctgctcgccagtaaggaacggattttcccgcagcatctcgtccaggcgccgcagagtccgcgaaaattcttcacgcgtttgtgcatccgcttccccatgagaaaccaaccaggaaggcgcgaccagctgcttattaagccaggcatcaaggtcatctagtttttcccgttccgccgccggatacaggtcaggggcttcaaaatggcagaaaggtttccaggcggtgcaaaaatctagcagcatatcggcagactcggtagccacaatctggttatcccgctgcgaatccaaaatcaccggcacagtttggggatcatcgggctcaaaagtgggctggcggcgataaagttcacgcgcggaacgcaccatcagcaccgggtcataggaatagccctctcgaataaactcgaaaccatccgggccagagccagtagcataacgaaccccaatcgcggcctctaaacctaaaagtcggcgcgcaatcgtcacccggcggcaataagggcaaaggggagaaactactagcaggtagcggccggcctgtaccggtaactcatcgctaccaaaacgataattcgggatcatggacaactcctgttccgggttcaaccctcattatcgcaaatgcggagcgccctcgctggctaagcgaaggtagtgaaaatgtggcataatgaacgagtgctccggggtcggtgaaaatccgaaccggcggtaaagtccgcgacccgcccgctttgggtggctgaaccggtgaaattccggtaccgacggttacagtccggatgagaggcagcacgggcagtcatgcccgcgtggcgcgttcgcgcgcccagctctcctcggaacacctgtgttcgcgaggaggtttttttattggcacactcgatgcccccaaagtcagcgctcactcatgcgctggcggccgccagtaaagccgctctacaaggcccgcgaaccggagggaatccccaggtaggctgcgctatcctttctccggcaggacggattctagcgatggggtatcaccggggagcaggaagtgcccacgccgaagcagatgccctcactaacttgaaagaagacaccggctccgccccgcttaccgcagtagtaaccctggagccttgcaaccatagcggtaaaactcctccctgtacccgcgccctcatcgaagccgggatcaaaaatgttatttgggcagtcgatgatcctaacccgaaagctgctggcggaggggaatacctaaaacaacaggggattaacgcccggcgcgccgatgaactaggggttgacgaaagcgtcctagccagcgcccgggcagttagcgctcattgggttcaggcagtcaggtgcggccgggcctggacgatcgcaaaagtggcacagaccctcgatgggtattgcgccgcccaggacgggtctagccagtggattaccaatcgactgtcgcgtgcctatgcgcaccgcattcgctcccgggtagatgtgattattgccggtaccggtacagtgcttgccgataatccccagctgacagcccgtctagccgatggacggaaattcccgcaacagccgcgccccctcatcattggcaaccgcgagattcctgcagatttttacctggcgggcaaagccgagcaggcgcgcacccatgacctcaaggcggtactagaaagctgctaccagcggggagagatttttgcgctgctggagggcggaccgactttaataactgctgcgctaaaggcgggcttggttgatgaactgcatgtttatctcgctccgcgtctgttgggagccgggcataaagggattggcgatctggggattaccactttgaccaactcgctggatttcagtttgcaacaagtaaaagagctaggcggagatgttttcttgggattagaaaaagaaggtgcgtcgtgtttaccgggctaattcaagaggtagggcgcattaaggtcctaaaaatgcaggaaaaagatctcgagatcggggtgtcttgcagtttcgctggtaaacttagcctgggagaatctgtggcgacctccgggatctgtttgacagtgacccgggtagagggcgataccttttttgcctatgcgatgccggaaaccgtaaagctcaccaccttgggacaaaagcgccttggcgacccgctgaacctggagcgcgccctcctacctacagatcgcctagggggacacctagtcgctgggcatatcgatggtactggcacagttacttccctagaggacagcgagcgctggctggagctgcagatttcgactccggcatcgctgcttccccagattgctcgcaagggctcgatcgcgattgacggagtgtctttgacggtaaccgcggtgggtgccgattactttagggtggcgctgattcccgtcacccgcgataacactactttagggacgctgcaggttggctcgaaagtcaacttagagactgaccaaatagctaaatatgtggaacgtttactggagggtaataaaaccaatgagtgacttggtgcagttatttgaacgggtgagcgccgcgctgcgagccggaaagcccgtcctggttgccgattccaaagaccgagaaaacgaggtcgatgcgatcgttagcgcccaaaaggtgactcccgagtggatggggtggatggtgcgctacacctctggctatatctgcgcccccatgcctgccaaacgcgcggaactgctaggactgcccatccagtggcccgccaatcaagaccagttgcgcacctgttatacggtttcctgcgacgcggcccacggggtgactaccggaatctcagctgcggatcgccgaaccactttgcgggctcttgcaaatcccctttctcgcagtgaagatttggtgcgaccgggacatattttgccgctgcgagcccgcagcggtggggtgtttacccgggcaggacataccgaatcggcagtggatctaatgaatctggcaggcctggagccggtagcggcgatcggggaaatggtgcacgatgacggctccatgattcgctatcatgactgcccggcgattgtcgaaaaattcgatttggaactaatcacggttgccgaactaaaagaatatctcacccaggtgaaaccgcaggcagatacagcagagattcctcgggttacccagatagcaaccgccaagttacccaccaagtttggggattttacggtgcgcgcctatcgggatgcggaactgggggcagttcatatcgctttgatttcggaaaagaccccggaggcgagtgcactggtgcgagtgcattccgaatgcctcaccggagagtcttttggctccctacgctgtgattgcggtccccaactgcaccaagctatgaagaaaatagctggtgaaggcggcgcgattatttacctgcgagggcaagaaggacgcgggattgggcttagcgaaaaaatcaaagcctatgctcttcaagaccaaggacgcgataccgctcaggcaaatcttgacctgggatggccggtagacctgcgtgaatacggggcggcggccgcgattttgcaggatctaaagatgactaatattcgtttgctgaccaataatccgcaaaaggcgcttttgacccgagacgggatccaggtagaggaaaccgtgcctttggaagtgggtatcgacccgcacaatatcgagtatttgcgcacgaaacagcggctggggcataccttccacaatctggataaattcgtggctgaaaaatagcggtcacgtcctagttataaataatcgacacgcgttaaggagaaagaaatggctggagccggagttcccgacctacatacttccgctgcggggaaaaaggtggtaatcattgctacccgctggcatgaacaggtaatggatggtctggtagcgggggcaaaacgcgcctgccaggatgcgaaagctgactttgaagtcgtacgggttccgggttccttcgaacttcccttagcggcgaaagcctacgccgagggcggtaaggccgacgcgctggtgtgcctgggggtggttatccgcggaggtactcctcattttgattacgtatgtgacgccgccacctacggccttaccaaagtatcggtggaatcccagattcccctagggtttgggctgctcacctgcgataacgtggagcaagccctggatcgggcaggactggaatcttcccatgaagataaaggctacgaggcgatgcaggcagcgctagcgatggtgcaggtcttaacggaggctaaaaactaggtgcgagtaccttttgctttgcgcgaatcacaggttccgggttaataactagctaccaatcagggtagagttagcagtcgaggcggtcgagtgcttaaaattttcagatggtgattcgcgctgccacagtccgagaacagtgaggagaaatgagccaggcaagtatccgtcgcgatgacgttttgcgagctatcgtcaccgattatgtggaaaccggtgaacctgtgggctctaaagcgttggttgatcggcatgatttgcgggtttcaccggctactgtgcgcaacgatatgtcagtgttggaagaaaagggctatctttatcagccgcacacttccgcggggcgagtgcctactgaaaaaggctaccgtgcctttgtagaccggatttctgagctgcgtcccatcaccagttcccagcgtcgcgctatcgaagcttttgtgctgggatctgccgattttgatgaggtagtcgaacggactgttcgggtattagcccagctcactcaacaattggcgattgtgcagtatccgcattttgaacgcagcggtctgcgtcatatcgaactgattccggttgccgaatacaaactgttagtaatcgtgattaccaatagcgcgcgggtgcagcaaactacgattgatactcgctacgaggtcgatgctgcgagcgctcgctccctggctatgctgttaaactccgctttggaggggatggaagaaactcaaatagcccagctagagccagttttaattgcaggagcccgccccgaacaactggaactaatcgcccaaatcatgccgattattcgcgaagccctaaccggggaacaaaccgaaagaatcgtgatggtgggagcgggaaatctggtgcgttctagccccgagttttctcgttccatcggctccattttggatgccttggaagaacaggtaactctgctgcgcctgttttccgagattgatcaacaagattcgccagttacggtgacgattgggtcggaatcgggggagcattccctctcagaaacttccatcgtgaccggtgcctatggagacaaggaaagcggggtcgcccacgtggggatagtaggcccgcaaaggatggactatccgcgcgctatgagcatagtgcgcgcggtttcccgatatttatcacgcatgatgaccaggtaggtaaaggaaagaggaaaaaataccgttggctgattattacgagattctaggggtttcccgggatgccaccgaggcggaaatccgtcgagcataccgccgtaaagcccgcaaattgcatcccgacgtagccgggccagaatcagaggaggctttcaaagaagtctctatggcacacgaagtcctctctgatcccgacaagcggcgtcgctacgatatgggaggcgattccgggtttgccagctccggtatgggggacttttcaatgttctccgatattttcgaatccttcttcggagccgagcccggcggcggacctactcccagagggcggagaggcgaagacctgcgtcaacgcctagagatctctttagaagaagcagtttttggggcaaagaaagaagttcaggtgcgtaccgcggtagtctgtcctacctgtgagggtagctgttgcgctcccggaacttccccgcgcacctgccaggtttgtaacggacgcggctcagtaacccgctccacccgcaccttcctggggcaaatgcaatccacggttccctgcagtgcttgcgccggtcacggtactactatcccggatccttgccccgaatgttccggtgaaggaagggtgcgcaccaccgccaccatgcagatagagattccttccggggtacaaaccggtcataaagtgcaactgcgcggtaaaggggctgtagggcctggcggcggtcccaatggagatttgtatttagagatcaaagtcagcgcccatcgggtattttcccggcacggagataacctggagaccactttgcgggtgccgatgacggccgccattttaggaacccaagtcgacctggaaaccttcgatggctcccaagagataaccattgcggcaggtacccagccagggcaacagattcgcctgccaggtctaggcgtaggacgtctgcagcgcgaaggtcgcggcgacctaatcgtaaacatcatggtgcaggtacctaccaaccttgataatgcccagcgtgaactaatcgagcagttagcagatctgcgaaaagaagaccgggtagaacccgaacccctcgaggacggtggggtcttctctcgcctgcgggaacgatttgcaggtcactaatgtttcttccggtatttctaggtgacgaatcctgcccgccgctttcttgcttgcaggaaggaggacgcggatccctcaaaggagcagaagccgcccacgcagtaggttcgctgcgactgggaataggggatcccctggacctggtcgacggtaagggattgcgcctgcgctgccagatattggcgaccgacaaaaactatttagagttcgaagtgcttcaggtaatgcacctatccttacctgatacccagtttgggctgattcaggcgctttctaaaggtgggcgcgacgaacaggcggtagagtcggcagtcgagttaggggtaagccgggtgcgtccctgggcggcgcagcgttccattgtgcagtggaaaggacaaaagctgcagcggggaagcaagaagtggctatcgctgctgcaagcggcggccaagcaatcacggcgcgctaactggccattgctggatcccctagctgattcccggcagttgcgggaaataattgcggccgggagcattgaagaaaagtttctgctgctagatccggattcctccctgcctctctctgaagcctgggagcaggtaagccaggctaaaatgatacatgtgatagtcgggccagagggcggggtgagcccgcaggaaactgcagactttagcgctgcgggcgccatagcagccaggctagggccgacagttttacgttcttctagtgctggaccagcagctttggcggcactagggctttgcagtggcctgtggggtcggaaggaatctctttaaatgagcgatgaacaaacccaggtgctattgcctgaagacttagatccggtactggtttttggtcccggcgaccaggtgttacgggcgatgcaagacaacctgccaggggtgcggattaactctcgcggcgggatagtgacttttcaaggtaatcctggcgaggcacgcatgggggcggatctgctgagcgagttgattgcggccgcccgccacggtaatcccttatccgcgtcggcagtccagcaagccttaaccctaatgtctacccaggaaaccctcccggtgctacgtaccaaacgtcggcagattcgggcaaaaactcctggtcagcaaagttatttagaggcgattaccaataatcgtatcgttttcggggtggggccggccggtactgggaaaacctatctggcgatggccaaagcagtggaagccttggaatctggggcagtgtcccgaatagtgttgacgcgcccggcagtagaggccggcgaatccctaggtttcttgccgggctctctaaccgaaaaaatcgatccctatctacgtcctctttatgatgccctcagagaaatgctggaacctgcagaacttgcccagcttttagaatcgggaactatcgaggtagctccgctcgcctatatgcgcggccgcaccatttcgcatgcgtttatcgtgctggatgaagcccaaaacactactactcagcagatgaaaatgttcctcacccgcctgggagaaggctccaccatggtggtgaccggtgatattacccaaatcgatttaccacgaggaaaactttcgggactaaaagacgctcgcaacgtcctcaccggagttaaagatatagaattttgctatttgaccagcgaggacgtggtgcgcgataagctggtgggaatgattattgacgcctacgaacaatccgcgaaaactcgaggtgaccagggggaggaataccgatgagcgtagaggttctcaacgagactgaatacccaatcgacggggtagaattccaagaaattgccgactatgtgttgcgggcgatgcacgtatcatctgcggcggaaatgtcggtgatttttgtagaaccggatgccatcgccgccctccataagcgttggttagatctggaaggccccactgatgtgatgagttttcccatagacgagctccgtcccggggctgcggatgccccgacggaggcgggagtcttaggcgatgtagtgatttgtccccaggtggcgcagacccaagctgccagtgccggtcattccactaccgaagaaatgttactgctcgcggtgcatggaatcttgcatctactgggatatgatcacgctgaaaaagacgaagaaaaagaaatgttcgctttgcagcgcaaactcctgctgactttcttggccgagcggggctgaccgtgttctcccagatacctgccgccgggctactcgttttagcgattgtgctagtgggggtagacgctgcctggacggcagctttgggagcttttcaaactctgtctcacgctcgcgcccaagacctggtggaggaaggacatcgccgtgcccgcctggtgcgttcactggttgaagaccgggcacgcaccgtggctatttgccagtcctggcgcctattcgcgcaagtcttagcagctacttgtatgaccttagctatgctcggcttcggtctggtctggtgggtggcgctattagtgtcactactggtattgggagcgttgctgctgatttttgccacatttgcgggtatgcggatagggcattaccgccccgaagccactgccctgtggctcagtaaattggtgagttttgggctgaaaatctcggttctatatcgccccatagagtggatcgcgcacaaaatagcgccactttccccagtagatgaggccgtctctcgcgcggaaatcgccgaagattttcgggaaatggtcgatgaaatggccgaggaagaaaacctggatttcgaggacgaagatcgtcagattgtgcgttccgctctggaactaggcaccactttggtgcgcgaaattattgtgccgcgcaccgatatggtgtcggtggagaccaccacccttgcccgggaagcctttgaaatttttatccaatccgggttttctcggattccggttcttggtgacgatgccgatgatgtgcgcggaatgctctacctaaaagatgtggtttcccgctgtttttcccgtcccgagctaatggatcacccggttccggagatgatgcgcgaagcattctttgttcctgaagtaatgctcgccgacgacttgatgcgccaaatgcaagccgatgcccctcatattgcggtggtagtggatgaatggggtggcaccgtaggcctggtaacgatagaagatatcctagaagagctggtgggagaggtaactgacgagcatgatcgcgccgaacaagaacccgagcaaatcgacgccgatacttgggtggtgcctgcccgcttaggtttggacgatttggccgaactggtagatctggaaatagatgatgacgaagtagatactgtcggcgggctgctggccaaagcgctgggcaaagtgccactgctcggctcttatgcccgggtcaaagggctggagctaactgtaaaaacggttgccggtcgccgccggcagatggataccctattggtaaaacgcctagagacagaaacggacgaggaatgagcgagcaagaaaaaaccgagcctaaaaatcatcgcgcgggattcgtttcaatcgtgggacgacccaatgtaggaaaatccacgctaacaaatgcgctggtagggcagaaagtggcgattacttcttctcgcccggaaactacccgtcacaatgtgcggggagtagtccagggagaggattaccagattgtgttggtggatactcccgggttgcaccgaccccgtacgctgctaggtaagcgccttaacgatatggtgcgcgaagctctggtagatgtagatgcggtggtattttgcgtgccggcagatcaaaagattggtccgggggatcgctatattgcagcggaactgaaagacctgaaaattccggtgattttggcggttaccaaagcagatctggtttctaaagaacgcatggtagcggcactggtagctgcgggggaactgggggattggaaagagattgttcccctcagcgccctagagggggaggtatcggtgctggctgatcagattgccaaatacctgccgtcctccccgcctctatatccccgcgatcaggttagcgatgaatcggtagaaaaaatgattgccgagtttgtgcgcgaggccgccttagaaggggtgcgggaagaacttccacactcgattgcggtacaggtagaagagattctctaccaaggggaagatagcggcccccgcttgggatacggaacgcaccacgccccgcaaagtaagcagggtgccaccgcggacaccggggatgctgccggttccgagagtgcgacctcgcctaaagttgctgttgccgagggcgcatcctcgtcatctcaagaggaaaccaaacccctagatgtacacgttaacgtattcgtggaacgcgattctcaaaagggaattttgattggtaaaggaggcagccatattcggcgggtacggatcaaatctaagcggcagattcaaaaactgttaggaaaaccggtgcaattacatctgcatgtgcgggtggcgaagaactggcagtcggataccaaaatgctggggcgcctgggattctagctcaccagcagggatatctcttagagactggagcttggaaaaataaggttttccgccactcttagcaacagcacaatcttgtaaacgtttccctagtcaggaattttcttgctaggattttaacgataaaacacttacgcgaggaggcgttttctgtggcaaccatccgtgacgtggctaaagccgccggagtttcaattgccaccgtttcgcgcgccctcaatggaagtacccatttagcgcctgctacccgagttaaagtagtagccgccgccgaggaactcggctatcaaaaagaccgcctagcagcggcgatgcggaccggacgcaccggagctatcggactggtgctgggggacgtgatgaacccgttttatgcgatgctagcgcattgcgtggagcgggcggtgcattcccacaagacctccctggtgctttcaaatgcccatgaggacgggcaaagctacgaaaacggaattcgatcgctggtaaaacagggggttgatggacttttagtggtgcctccctcgcggattaagcctggctggaagcatccggctcctcccgagggaatagcaatggtggctctagatcgggaagctccgggaaccaagattccctcggtacttattgactccacccaggcgatgcgagatatggctgagcatttacgggaagtcggttatcaccgtcccgcctacctggcgggtccagagttttgtttatcggggcaaaggcgcacagaaaagctacaggaagctttggccagttgtggttttggaaagctagaagtggagtattgcccccatgaggcagtttcggctgccagcgctacccgggcgctgctggcgctttaccgtccagatattattatttgcgcctctaatcagattgccctgggagtattgatgattgccaagagcatggggatgcagctaggttccgatttaggattagtagcgattgatgacattccctggttctcggtgatgtccccggcgatcaccgtgattgaccaacccgtagacaagctggctaatctaggggtaactgtactgatgaaacagattttcggggcggcctatgtacctaaggcaggggatgttttagtggcgggtgaaggtgcctttattccccgagagtccacccaggggccaagcctgtccgctcaatatgcgggacgttggttaccagaaagtggaaaaactgtttagagtaggtatatgcgcgcattgattctgctgctaggctgccgcgacgaagtccagtaaaactggtcgagactcgtcgcgggattctttgctgtcctcggccagccacttaaaaagcagaaagaaatcttagaatgcgaactactggtaaagctcctcgtcaacaaccgtccgggatgccgtttcaaaagtatgcccacttttgggatacttccctaaaactgccggatcgtacctggccagataaaaatgttacccaggctcctcgctggctatctacggatttgcgagacggcaaccaggccttgattgaccctatggatccgctgcgtaaacgaaaaatgttcgatctgttggtacagatagggatgaaagaaatcgaaatcgggtttccggcggcctcacaggtagattttgacttcgtgcgctcactagttgaagatgacgcgattcccgaagacgtctgcgtttcagtcctcacccaggcgcgcgaagacctaatcggacgcaccgtggaatccctagtgggggtgccgcgtgccaatgtgcatatctataacgccacctcacccacttttcgggaagtagtattccacaacgataaggcggccaccgtagaactggcggtgagcggggtacgcgaagtaatcgcgcaagcggaaaagcaattggatgattctacggtttttggtctgcaatattcccccgagattttcgtggataccgaagctgagtttgccctggaaatctgtgaagcggtcatggatatctggcagcccgatgaggatcgcgaaattattttgaacctgccggctaccgtagagcgttacaccccggactcctatgcagatcagattgaatggatgagccgtaaccttagccgccgcgaacacgtatgcctgtcggtacataaccataatgaccgcggcaccgggatcgcagccgcggaactttctatgaaagcaggcgctgaccgggtagaaggctgcctcttggggcaaggcgagcggactggcaacgtagatttgattaccttggcgatgaatctttattcccaaggcatcgaccccatgctggatttatctaacctggataaggtgcgcgaaacggtcgagcactgtactcgcatggaaaccaatccccgccaaccctataccggcgatttggtttacacctccttctccggttcccaccaagacgccatcaagaaaggcttcgataagcgtgcccgggaggttaaagctgccggtggcgaccaaaaccaagttatctggacagtaccttacttaccgatagacccgggcgatatcgggcgcgactaccaggcagtggttcgggtgaactcccagtccggcaagggcggaatcgcattcatgatgaaacgggattattccttggatttgccacgccgcctgcaggtggagttctatcgtcacgttcaggactacacagaagagttcgggggcgaggtcgactcgcagcatttgtggaagatttttgccgatgaatatttgcccggcgaagaacacagcctcacgccttggggccgctttaagctgcgggattctcgcgccgataccaaccacgaaactggggaagtgtccctgcgggctcaggtaagcgataacggtactatgcggactttagaagcggtggcgcccggacctatcgaggctttcattactgctttccaagggctagggctggatatcaaagttctggactatgtcgagcacgcgatggaaaccggcgaaagttcgcgggcagcagcctatgtcgaggccgagattgccggtcaggtgctgtggggagtaggtatcgatccatcgattacccgcgctacctataaggcagtcatcagcgccctcaaccgcgcggaacgctaaggcgtggattttttcgaatagtgttttgaactcgattaatagatgctaaaagtcgtttttcaggaagtctagcaatcgttttgtaggttttacgtggctgctggcattagtatttgcggaggcggccgctagctctcgcccgtaagcgccctttgaactgtgtcaaagctgaactagcaagtagatgtgagataataaccgggtgctgcgaacctataccgaccaggcgattgtcctgcgaaccaccaagctaggggaagcagacatgattttgaccctgctcaccctcgagcacgggcaagtgcgggcagtagctaaaggactgcgccgcacctcctcgaaattcggggcgcgtctcagtccctttaatcgggtaaaactgcagctgcacctggggagaaatctggataccgtcacccaagccgagtcgctcagcctgaatgccccggcgattgccgccgattatgaacgttacctatccgggcaggtaatgttagaaaccgcggaaaaactttctgagggcgaggcttcgcgcagccaataccgtctgcttgctggagcaataccagccttagcgaaccgcgcgcaccgccccggcatggtgctatcctcgtatcttttgcgcacccttgcgattgccggatgggctccggctttaagcgcgtgttccctctgcggatctgacggcccctttaaagtattctcggcgccagcaggtggggtggtatgcgcagattgccagctcagcggaggaatacgcatctcagatccagtaaccaagctgcttactttgctgcttgccgggcaatggccacaggtttaccaggcagatgctctaacccagggcatcgcagaagaagtggttactgcctataccgagtgggttttagagagaaaactaaaatccctgtcggtcagggaacgcaaggcataataagaacatgagcgataaagacttggtagcaactattccccccgggcagggcgcctccatacctccgttatcgcaggttcccacccacgtggcgctaatcatggatggcaatggacgctgggctaatcaacagggtttgccgcgcacggcagggcatcaagccggagaactgtcgctgatggacaccctggcaggagcagtcgaggctggggtgaaaatggtgagcgtctatgctttttccaccgagaattggaaacgctccccggcggaagtgcgtttccttatggggtattcgcgagacgtgattcgccggcgctcccgcgaactcaacgactggaacgtgcgcatagtgtggtcggggcggcgcgggcgcctctggaagtcagttatcaaagaattagaagctgccgccgatttgaccaggaaaaacaccgggatggtgttcaatatgtgtataaattacggaggacgcgcggaactggtggacgctgcccgcgcagttgcccgccgggtagcggccggggaaatcagcgaaaaccatatccgcgaggacaccttagcgcgagaaatgtatctaggaggaatgccggatgtggatttactgatccgcacctccggggaacagcgcctgtctaatttcttgctgtggcaatgtgcctatgcggaacttagctttgttcccgagatgtggccagattttaaacgggaacaactctggcgggaactagcagcttttggagggcgcaatcggcgttttggaggagccaaagatcagccccaaggctcctaagtaccctgttagcagccttttgcagccgacacaaccgggcccttgaaaatcccgaagtgcgccctggtaaaaataaggatgattaaccccggtattactaatcccagagaggatgggcaaacaggccactgcccagtttcggctcgaaccaagtggacttagggggcatgattttatcggcatctgccacttccatcacttggtcaatctgggtgggatacatatagaaggcacacgccgcgccattatctaccgctgctttcagctcgccatccccgcgaatcccgcctacgaaatcgatgcgctcgctggtgcggggatctttaattcccagtaggggagaaagcactttttcttgcagcaaagatacgtctaaggaatcgggcagctttttaccagctataaccccgggatggaaactgcatgcataccatttgccgcccagatacatactgaacgagccggcattttctgggggagcgaactttcctagttcagttatcgccgctacctgcgctaagtcgttcaagaactgcgcggggttagtatctccccaatcaagcactagccggttatagggaaggcagcgcaagtcgtggtcgggaaccgctaccactaaaaactcattccagggagcttcggggcgctgcgggcgagtaagtcccacttttgccgccgatgcggagcggtgatgcccatcggcaatatagaagtagtccagcgcctctagggcgcgagcagccgaggcggtatcttcatccgataagggccaaagctcatggcgggtaccatctaaagttttgccctcaagcagtggtgtttctttggttaccctcgcggtgatctcgtcgatttcttgattggctcgataggtgagaaacaccggttccgtgtgggcatttacccggtcgaaatgtttaattcggtcggactctttgattgccaaagttttttcgtgccgcttaatagttccgttttgataatcgactacctgggcgcacccgacgattcccacctgggcggcgcctcgccaagtctcccggtacagatacaggcaggggcggtcttcacggaccagcaccccacggtcaataaaatcggccagattggcggcggcctgctcgtgcacctggtcagcgtgttgatccacgcttgagggtaaatcaatctccgcgcgggtgatatgtagataggaatcggggtctttgccctgttctgccgcctcctcccggttcatgacgtcatagggcagtgccactactcgcggggcggcctcgctagtgggacgcagagcgcgaaaaggacgcaacttcggcatcaaaatctccttaaagctattacctttgcctccagtttatcggctgagcctaggtttcgtagttgcgcgccaactattagccggcggaaagatagaatcctggactggtgtagaaggaattggtttcctgtcctggttacgtagggaaaatatttggcttcctctggctatttacggaagtaggcataaacatcggggttgaatacccagtcgaactgcccgatcatttctaatagaccgccctcgccacaaaatgcttttttgaagctgtagagtccgccggagttatccacctcgtagattgctcccatatcgtattgggtatatccctgttcaatagcgtccttaatcgcttcattgttcatttgatagttgggtcgcagatttcgtttttcattggaactagcagcgtaaatataaaaacatttccggttaaatcccaaagtgatagcgcaggagagtacctcatgctcggcggtgcgagtttcatagagagttactgcttccggtgggaatgcattaaataggcgcacgaaataatctttagggcgataggtgattccctgccgctccgccattatcttggttagttcataaaatttatcgagagtttcctcgaactgcggatcaccgcgatggaagcgtaaagtttctagaccatgtttgtaaggaacctttattttgcttttattttttgattttacggtcttcaaaaacccttcatgcgatcccatggaaatgtccgcaatcatattcatcctgggattagaaaagttgtgttcatcggctccgcgggtagtaatctccagattatctatgccggcattccgatagcttgcaagcacctcttcgtcgtaggcaaactcggggtccatccttaaaacaaaaccgttgcgtttttcaatcaccggggcggcctcgtttaccagcgctttcaccgtgtcaatatccttaaaattgcagacgggaccgcggggggcatacataaaagcatgctcgccatggttcctgatagaaagtattgacagggcagcagtaatatttcccgcatcgtcttgcagatatacgtagtcactatcccagttattctttgcttttgcccagtttaaggattgcatgacgtgaccgtagggactggaagcaacgaattcttcatagcgagctactgcttcactattagataaatccaaaatgggcacgataatgctcctcgcttatctgggataaccacatatattcccggaatgaaatcattgcttaggatacattactcctggagtgcggtagtgatcccatttatcagctactttgaacgggattctagggaggagctatcccggtatcttcttgccctaaagtaatggtatccgctccaaacagcatattccttgggggagttctttgtcgggctttagaatgtctacatgacccaaagtgcgttcctaccgttgaaaaactgtctcgctacgcttactgatactcgcgctgaagattggttcttatttatgcgcgcccgccacgggatggcaaccgtctaccaaaccttgcaccaatgctttggccagggaacggtaaccactcaggcgtatacctgtgtcactgcgattaaccccatcttggtggctggtcttaaacccgaatacggggatattgatcccgattccatcgctttagtccccgacttcgcgcccctccatgagcagacgcgggcggtggtgtggcagaacactttcggaattctcgcggacagcaaggcggcgctgttgcgttcgcgggttcagagcaccccggcgatttttctggaagactccgctcactgcgtcggatcaatgcttcgcgataaccagggagaaccactggcggatatttcggtgcactctttcggggtagaaaaacttctgcctaccaagtttgggggtgctatctggattaatccgcgcctgaaggagcgcagcccgcagcaccaacgctttgtggaagagcttaagaccgcttgcgccggggtgcgcgctccccaggggcgcgaagaaaaagccatgcgccgctattttaaccaagtgcgggtactcaaccatttaccgcagatgctctcggctcccctgcggaaaactctaataaaaaccgatagatttttagccccgattattcccctggagcagcagggaaagttagaccgtgcccccgctttgccctccaagtgggtggcagatcaggcgctttcgcaattgaataagattgaagctactcggcggcgacgccagcaagtgcagcacgtttatcaagaaaagctcaggcggcggctgcaaataccggcagatatcagtgattcccaggctctagtgcgtttcccgatatttgttgagggcgctacctcggccaatggggcggaaagcctcttttctttcttgcacgcgcgcggctattacccgggacgctggtatcgaccggcactatttcctggggtaaaagactacgagctctacaacctagatcctgagctttccgacttgcccaataccgagcgcctgatagaaagcgccattaaccttcccacgcaggaaagcgttccgcgagcccaagaaatcgtctccctggtaaaccagtgggtaggcgataactcctaacagccactttttcaggccggacggggaagcgaacaagtaactacggcagagagccctcggtcacagtagttttcgcccctgacagcttgcctattagactaggcgcgatgacaagcaacgataaaatgccccgaacctaccatgtgcgcaccctggggtgccagatgaacgagcatgactccgaacgcatggcgggtctgctagaagctgacggcctggtgccagtagagctggtgccggccgccgccgcgcgcgccaccaatgcaggtgacgggggagcagatgtagtcgtaatcaacacctgttcggtgcgggaagctgcagctaaccgcctgttcgggaacctggggcaactagccagcgtgaagcgggagcgccccggaatgcagatcgcggtcgggggttgcctagcgcaacagatgcgcgagaaaatcattgaaaaagccccctacgtggacgcggttttcggtacccacaatattgacgtcctccccgccctgctgcgcagatccgcccataaccggcaggcagcggtagaaatcgcagaatctctaaaggtatttccctccactttgcctacccgccgcgaatccgcctattccgcctgggtatccatctcggtgggttgtaataacacctgtactttctgcattgttccttctttgcgagggcgcgaacgcgatcggcgtcctggggaagtactcgcggaagttgaggccgtggtggcacagggagctttggaggttaccttactggggcaaaacgtgaactcttatggagccggatttggtgatcgcggagccttcgctaagctgctgcgtgcctgcggaaatgttgaagatttagagcgggtacgcttcacttccccccatccggcagcctttagtgatgacgtgatttgggcgatggcggaaactgaaaacgtgatgcccactttgcatatgccgttgcagtcgggttccgatactattttgcgcgcgatgcgccgctcctaccggcaaaaacgtttcctagggatactagataaggtacgtcaggccatgcctgaggccgcgatttcaactgatattattgtcggcttcccgggggaaaccgaggaagacttccaacaaaccctagaggtagtggagcaggcccgttttgcttctgccttcactttcctgtattcgccgcgtccgggcactccggcggccgatcgcgaggatcagattcctcaccaggtcaagctagagcgttacaaccgtttgattgccttgcaggaaaagatttgcctggcagaaaaccaaaagttggaaggaagcaccgttgaagttttagtggctgagggcgagggtcgaaaagatcaagaaactcaccgggtgtcaggcagggcgcgcgatggtcgcctagtccacgtggcgctacctgccggacagaaagctccacgacctggagatatcgtgactgcgaaagttacttacggcgcgcctcataacctgattgcggattccgccctcaacgggggaatgttctcggtgcgcgctactagagccggagatgcctgggaagcgcgccaaagtaaagaagaagaatactcccagcaggtgtctctgggaattcccgctattcgtcctcgtgggtaggtagcttaatggatgcttccaaacttcctctcgttgcggtagttgggctaacagccagtggaaaatccggtttttccctgcagctagcccgggcgttaggagagcgtggcattacctgcgagattatttctgctgatgccttccagctctaccggggaatggatatcgggaccgcgaaagttcctctagaggagcgcggagggattccccaccatctactggatgttctggaactagcggaaaaagcctcagtagctgcctatcagcgcagttgccgcccggtgattaacgaacttcgcgcgcggaaagccctgccgatgctggtgggagggagcgggctctatgtgcgcgccgccttggatgaaatcgagtttcccggaactgatagcgctgtcagggaacggattaccgcccaggcagtgcaactgggggcagaaaaaatgcatcaacgccttgccgaagtagatccggagtccgctgccagaatcttgcccagcaatgtacgccgagttatccgcgcgctggaagtatatgagataaccggcaaaaaattttctgccactatgccgcggcgggaatattttcagcctactttgcagttgggaatcaactggccactagcagtgctcgatgagcgcattagccagcgcaccgcccaaatgttggcacacggatttatccaagaagttgcgcagctagaaaaacagggactggcccatacccccacggcttgccgcgccaccggctaccaggcggttatggatttgctggccggaaaaatcacccgcgaagaggccgcagagcaaatctcgctacatacccggcagttagcccgcaaacagcgtaaatggttccgcaaagacccgagaatccattggctagacggcgaagcaggcacgtcggccaacctagaccaagccctaactctcctcgaaatcgagcattagccacaatattacgagggggcgagatttttcctcccgcccaagaattcggaaaacgtggcgacgttttccgaattcttatgcccaccgcgcccactcggataaaatctcgtcccctcgtttaggacgctttctcgtaccaaaccggcttcatgtggggacaagggtcgcggccggtaaaagatgcgagaggggctcgttccgcttgctccaagcggaacgcggggtccccggagcgcttttaccgagccagacctgatcagatctgtagctatttcttgacttcggttccaccccattcgatgactgtgaatccggtgcgcttcggggctttcagagtttgcggcttaaccttgatcggcttgtctagcgccttgaacgccatataaacccggatagtggtttttggcttcggggatacctgcaacttggcgttgtcagtgtagttcttgccttggaaagaaatcagattccacttattagcctccatcttgggtagccaatagacaatgaactcattagcttcacgccggttcagccccagtttgggtagcgacttttctaagaacttggctgagtcagagcctttgactacaaaaccgtgagagaaatcccaggggaacttataagacagcccttcccaatagaggtagttgtaggtgtttccgtagccacttaataaaccgttgggattcgccatgacgttccagccaccttttgccggatacttcggataggtagtggtgagtgctccgaggtcaggattgattttaatcttgacgttcaccttggttttcttagtggggtacagatagataaccggttttcccatcccatctgctatggttggtggcggttcttgagcctgctggcgctgggcgcgggcggcggcttctcgagctgcttgcgcggcggcggcttggcgagcggcttcctcctggcgggcttgttcttccgcctcggccatggcaatctcgtcttttttagcttggcgggcgtcggttaccacttcgacttgcttggtgatttcctcatctttcatcccatactcgccgtaaaccttctttaactgctcaagctgctcgtcggtaacgttttccggttcgatcggctccagggggatatttagctggggagcagggcaggaagtacactcctcagagttattctcagtatctggggaatcggtggcctcgctattttcctgactatctgaggattcaggggcttcgctaggttcctgactatctgaggattcaggggctccgctagtttcctcactttctggggtactagcaggcgcatctttcttttcaggcggagttaccttgatatgaaactcatttttcgggatgttatagatgcgtccatcgttttggatgggggaggcttctaccttcagggtgtagcttcctcgcaaaagtttaaccttggttctcttggggtaaaacttgatccgtttatctacttttttcttatctaaatctgttccttggacgcggataggtacgaaagtagctttctcgggagtgtagtccgagccagtcacgtcaatctttaccgcttgatactgatgggcggcttgccaggcagcgttttcagcctgttgcttcctgaaaatccataaaccaccgatgcagctaaaaatcagcacgatggccaggatgcaagaaataatgagcagttttttccgactcttctcaccggagttgttttcccccgtgggattcgggtagcccccgggataaccgccattgggaggaaacccagcaggggcaggcgaggccataggctgcggggaatagccaccgggattacctgggtagttatatccattgttacccatcggcggttggggagacatactcggggacatactgaaaactccttgataaagagataaaaactaccgcaacgccagtagccgtttcttttgggaaaccctttaccaaaaaagtttagacctcctaaacccaccgaaatttaaaactgccagaatgaaaattcagacaaaaccccgccaacccgcagaatgaattagtcgtacgagggggcgagatttttcctcccgcccaagaattcggaaaacgtagcgacgtttcccgaattcttatgcccaccgcgcctgctcggataaaatctcgccccctcgtttaggaggcattctcgtaccgaagcctcttcatgcgggggatagtttttatccgataggttaggcgggcgtaaatccctatttgccacaggcaaatagggattttgggcaggaggaaaaaactatcccccgcatgtttagtgcttttccgcgtatgactgactaacggtacagcttgcttcagaggaggaaaaatctcgcccccgtgtgttgatccagacccgattggatgcgtagcagtatttgcaggaggaaaaatcttgcccccgcgtgttcagccagacccgtgatagggaagtttaatcttcgatgacgatggcgtgggcagtttcccggtcaatgcggccgaagttatagaaggccgcacatgcgccctcgggggaaaccatacaggtaccaatgggtttctccggggaacaggcggtaccgaacactttacattcccaaggcttaatccgcccggtaagtactgatccgcattcgcaggccgggggatcgggaacccgcactcccggcacgttatacagccgctcagcatcccagggggcaaattcctcggaaatccccatcccggagtaaggcatccagcctagaccgcgccactcgaaggtgtcacgggtagaaaatacccgatccaggagcctgagagcagcgagattaccttcgtgacgtactacccgtgagtattgattttctactcgcgcttctccacgtgctactgctcccgacagatattggtcaattagcatcgctaccgactgcaaaatatcgagcggctcaaacccggtgactaccaccggtttgttatattcctttggcaagaacttgaaagcatccgagccgactaccgtggccacatgcccgggaccaataaaaccgtcgatccgggtttcatcagcgcccacaatcgcgcgcagcggcggttcaatcttcacgtgattagaaaacacagaaaagttctttacctgttgtttcttcgcggctaccagagtaactgcggtggagggggcagtggtttcgaacccaatcgcaaagaaaattaccttcttatctggattttctttcgcaatttttaaagcatccaagggcgaatatacgaaacggacgtcgcgcccgcgcgccctcgcctgcagcagagattctttagatcccggcacccgcatcatgtccccgaaagtcgtcaaaatgacatccggctgattagctagccacagcgcgtcatctacccgtcccatggggatgacgcacactgggcagcccggaccgtgaatgaactgcacgttttctggtaaaagatgttctagaccatgccggtaaatagtgtgggtgtgtcctccgcaaatctccataaatgctagcgggcgctcaaagtgtttggcctccgaattgatgcgttctaccagtttgcgcgcaaactcggggtcgcggaattcgtcaacatacttcatttgtttggtctcttttcgcggttgaaagatttgggtagggtgagctggttagaccgaggtggtcttaaattgctctagttcgctttcgaactgccccagttttctgatctgatccaaagtggtggcggcctcttccgcgtcgatctgtgacatcgcaaatcccacatgtaccagcacccaatcaccaactttcaaaccctcgtctgccagcagatctgtggaaatcatccgttcaaccccggatagcgaaaccttggcgcggccgctctcattttcatcgaatgccacaatttcggcaggaactcccaaacacatagaaccctccttgagctaattgctttccaggttacttgcaattgtcagcgctatcaaagatgaaaatcaccgccggtttgtgcgattatcaaagagtggatcctaaaaaccgcctaaatgatgacgaactcaaagtaaattccaatattgcgcgggtacgcagccgcggaatgaaactcaaagacgactacgtgacgctctcgcacggcgcgggcgggaaggcctctgctgccctagttgagcaggttttcgtttccggttacggcaacgaagtcctagaggaactcaccgatgccggggtgctgcccctagcagaacttctgggcgcggatagcgagggcgaggacgctttcaaggatctcgccggctacaaactggcaatgtccaccgattcctatgtggtgaaccctacggtattccctggggggtctatcggggagctggcggttaacggtaccgtcaatgacctggcagtctcgggcgctatccccaaggtaattagcgccggttttattttggaggaaggactgccgatcgcggaattacgccgggaagtacaggcgatgcgtgaggccgccgagaaagctggggtacggatcgttaccggcgacactaaagtggttcctcaaggtagcggtgacaaactgttcattaacaccgcaggggtcgggatagtgccaggtgagcgccgcctgggtgcctcacaggtgcagcgcggagaccggattattgtttccggagcaatcgcagatcacggcatgtcagtgatgatggcgcgcggtgatctcgcgattgaagcccccattaaatccgatactcgcgcggttaatcacctggtagaagcgctaatggcggcggtgtcggatacccgctggatgcgtgatgctacacgcggcggtctgggaacggtactgaacgaactagcggtggctaccgggtgggggatagctatcgaggacgaatctattccggtacacgatatgactcgcggtgcctgcgatatgttgggcatcgaccccatctatgtggcgaacgaaggtatgttctgcgcggtagttcctgccgatcaggttgatagcgcactggcagcgctgcgagcactgcccggcggggaagaagccgctaatatcgggcgggtagtttctaaaccggagtcatcggtagtgatggtgacggctttcgggggtacccggatgattgatatgttggtgggcgatccgcttccgcgaatctgctagccggttggaagtcagcaagtaaggggtcaattcgtaggcgcgaaaatcacccttagcaagcgcccaaaactgctgcccacgcctgccctaggcagaggccgccatcattgggaggcacggctttatgagttaatacttcatagccgccttcgtgcagcatacagataaaattgctgctaaataaacgattgagggcaactccaccggttagccccagggtttttatgcctgctttgtcagcggattctctagcctggtcgcccaagagctgcgccaatcccagatggaactgccaggcgcgttcgcctacttcccgatcgtcctcacccagcatttcaaaaagttcccggtagctattaacgcgcaaagacggtgcgcctatatgcctgtttgcccagctggtagcggcgtactctagttccattgctgcttgcgcctcataggtgactgaggtgcagattcctaatatggcggctgccgcgtcaaataatctgccgcaactggtggtcgccactacgccaaagccgctgtttaactgactttttactagctctaactcggcgttctttccctgccgatccccaatttcagcgcttattttctgggtaatccaatccagattccaatcgtgtgcaatccccaaagctacccgccaggggtaacgcactgcgcgatctcctcccaccaggctaaaggaggggaggtgagcgcggcgatgccaatctgaacctgcaatctctaggatttctccgccccaaatagtgctatccgtgccatacccggtgccatccacggctactattaccgccggatcccggcgggaatgttctgccagcagactataggcgtgcgccacgtggtgctgtacctgcactaattcaatgccgtgctggtcggcaaaacgcgaagcccaactgacggtggaataagacgggtgcaggtcacaaaccactttttttggttgttggtgctgaaaattcagcatctgcgctaccgcccgatccaaagcctcctggctggcgagggttcccatatcgcctatatgccctgaaatatgcgcccagtttccactggcaaggcaaaatgtattcttcagttctccgcctaccgccaagatcggtgtcgtggctgcatgaggcaatgccaccggcaacggtgcataaccgcgcgaacgccgcgaagggatcattacctgcgcgcttgctaagaaaaccgagtcctccatcggcaggtgaatatcgcgatcatggaacacgaaagcgtccgctatccgtgatagccgttcgaatgcgtcctcgttcgtaaaacacagtggttcgcccgccagattcccggaagtcgccaccaacgccatctcggtgcattcggcgcttaaaagttctaagtgcaaaggggcgtagggcaataaaatccctacgtcgcctaagccaggagccaccgcaggcgccaaatcgtaccctttgccaaagggagcaatcacaatgggacgcgccggggaagatagctctgtaacctgtttagcatttagttgtgctagcgcttgagcagctttaacactgggagccatcactgcaaatggtttatccccgcggttcttgcgcttacgtagccgggcgaccgcctcctgattgcgggcatcacacattaaatgaaaaccgccgatacctttaaccgccaggatttctccccgccgcaaactcgcgcgtgcctgggataaagcagccgaaatcaaggaacggcgatctcctgccggagggcgcaactgggggtttttagtatcgctcacccacagcaccgggccacaatcgaagcaactaaccggttgcgcatggtagcgccgatttttcggatcggtatattctgcctggcaggccggacacattgggaacttaaccatagtggtggtgtcccgatcatagggtaaatcccgcataatcgttgcccgcggcccacagttcgtgcaggtgataaaaggatagtggtagcgccgattattcggatctaccatttcttgtcggcaatctggacaggtggcggtgtcgggaggaatcaaggtgcgcgtgccggagcgccgccgcgaggagacaatcctaaatccgtcttcgccctctatttcgggaatatcttggcaggcactatggaggacgcgtgccaggggaggcaaagtcgccagcattttcgtcataaagttttcaatatcgctggcggcgccttgagcttcgataaataccgattcatcatcattacccacgaaaccgctgatagcgaaagcggcggcgactttagctacatgggggcgaaaacccaccccttgcactacgccgcgcagccgataggctcgccgcattccgacctccccgattagtgaaacctcaacattctaagcctagtggtaagcggaagggagggaacaaggtaaagttggtagcgccctcgcggcggctcccaccagaccaatgaaggagaagcaatgcatgaagtttcgcttgcgcgccagcttgcccgcattgtttcccggcacgcggctggacgagaggttttagaggtagagctagaggtcgggcatttacggcaagtggtgccggaggctttgcagtttgcgtggagtgccgttcgtaaaaacactttgtcaggttctgcccggctcaatatcaccgagatacctgcggtaattgtctgcgagaattgcggagcaaaaacccaaatgggggaagttttagatttccgttgctcccaatgccacgctcgagaagtagcgaccattagcggagaagagtttagagtagtgtccatagaggtcacaccagagaggaaacaataagatgggacgttttcatcgtcacgacgacggcactgttcatgcgcacgatcacggggatcatgcccaccaccacgatcacggtgactatatagccgatccggaagtgattggggatcattcgggatacgacaccgagaaagaacgcattgaaatcctagaagatatctatgcggaaaacgaccacttggcagcacataaccgccaggctttcgcagaaaataacgtgaaagtggttaatctgatgagctcgcccggatctgggaaaaccactctgctagagcacactttggcgaaactgcaaggtcagctgcgagtaggcattatcgagggcgatattgaaactcctttagatgccgagcgcctcaatggctacggtgcccagatatccctgctgaacaccggacagggtttcggaggtgaatgccacctggacgcgccaatggtgcaccacactttagaaggtctagatttaagccagcttgacctagtgattattgagaacgtgggcaacttggtgtgtccggccgagtttgatgtgggcgaaaacgccaaagcgatggtgttttctattaccgagggcgaggataagcccctcaaatatccggtgatgttccgctcggtggaaatcgtggtggttaacaagatggatctagcgccctatctgaagttcgatatggacaggttccgcggatacttagagcaggttaaccccggggtgaaagtgattgaaatgtcggcgctaaacggggaaggaattgacccctggatccagtggttaaagcaactataaatacgaaatttttttttgcgaaataaaataggtgtttcagcagcttaaccggatataaaaaaggtaactgagtacaataatcccgagagacgttgtggtctaacttcaatatcagtgaggaaccggaaatgagctatgagataaaaccgtggcgggagggaaccctcgccgataacctcgccagtgccggggtaagtcgacgggattttgttaaatactgtgctggtctggcagctattttcgcggtaggcaccccggagttggcacacgctgctccggctcagcgtgcagccgaggaactggctgacaaaatgggcgcgattactaaaccgaatgtggtgtggttgcagctccaagaatgtaccggctgtatggaatccgctttgcgtagtgggggaaccactgtggaagaagtggtgctgaacctactttcggtgaactacaacgagttggtaatggcggctgcgggtgaggccgctgaaaaggcgctggccgacactaacgccaaagaacatatcttggtggtcaatggctctattccagttaaagatggcggtatttactgcactatcggtggtaaatctgccgaacaggtgctacgggaatcagcggaaaacgccactatgattttggcagtcggggcatgtgcagtctttggttccgtgcaagcggccaaacctaaccccaccggcgccgtcggcgtggatgaaatcatcaaagacaaacaggttattaacgtttctggttgccccccaattggggaagtaatcaccgcctccttaacctatattttgactcacggtaaagctcccgagcttgattcggaaggacgccccctattcgcctatggccagcgtattcacgactcctgcccgcgccggccgcacttcgatgccggccagtacgtgcgtaccttcgacgatgccggagctcgtgaaggctggtgtctatacgatgtgggatgtaaagggccttccactttcagtccttgcccgatagtgcagtggaacctgaagtctggctggccgatcggtgccggtcacccctgtattggttgtactgaacgcgacttttatgatcgcttcacccccttctatcagaagctgcccacagtaccgggctttggggtagaggcaaccgctgaaaaggtgggtctggggcttaccggggcagttgctgccggcgttgccgtgcatgcggggataaccgctgctagagccgcagctgaccggaaagcaaccaagaattcgccgatgtcggcgtttggtgacgccactgctatcgataccgaaccatctccatccagcgaagaacctatggcgcaaacacccgaggcaaccaccgagaagaacagtgaggctaaataatggctgaaaaagtagttatcgacccgttgactcgtattgagggtcacctgcgcatcgagatggaaaccgctgggaaccagattaagaaagcctggagcgttagcacccagtttcgaggaattgaaactattgtccagcatcgcgacccccgggatgtgtgggcatttgtccagcgtatttgcggggtgtgtacttcggttcacgcgattgcttcgattaccgcagtcgagaacgcgattggttccaatccccccgaaaacgcacgtttaatccgcggtttagttttggggtcacaagaaatccaagaccacgtgattcacttctatcacttgcacgctttggacttcgtgaatgttccgaacgcggctaaggcagatcccgccaaagctatggagtttgcacactccataggttccaaatggcggggcaataacctaaagcgcttcaccgaagtgcgggacactattcaacaggtgcttgattccggacagctgtcggtgtttaccggcgggtattgggatcatcctgattaccgtcttcctcctgaagctgatttgatgtgcgtggcgcactatctggatgccttagaattccaacgctcgatgattcgtatcaacaccgtcttcgggggcaagaacccgcacccgaacttcctggtaggcgggatggcatgttcgattgatccgaattcttcggaatctatcaaccaggtacagctcgaccaggtgaaggcgtggattgatgaaattatcgagttcgtcaatgactgctattaccccgatgtgattgccctggcaggcgtctataaagactatttcgatattggcgccactcacccgaactacttggcagtaggattggcgggagccaccttcagtggcgatcccaatgattcccgactgaaatctccgcatatggctatcaaaccgggggtagtagtcaatggggatttgagcaaggctttgcccttcgatccgcacaagattgaagagttcgtcacctccgcctggtatgaatactcggtgggcgacaagaaggggctaactcctgacaagggcgaaaccacagtaaaatataccggcccccagccgccttttgaatggctagccgatcacgataaatacacctggtctaaggctcctcgttatgacgggaaaccaatgcaggttggtccggtagcgcggatggttgtggcttatgcccaagggtatgaaccggttaagaaactggttgacggggctattgaaaccctgggaattacccccgatcaaattaactccacgatgggacgcacttttgcgcgcgcagcggaagcccgggtttccgctgacttgttgcgagaggattacaacgctttggtgaataacatcaagcaaggtaatattgacgttttcgacgccagcaagtgggaaccctccagctggccagaaaccggccaagggtactcgtttgtagaggttgcgcggggtaatctatcgcactgggtaaccattaagaacgggaaggtggatcgctatcaagcagtggtacccaccacctggttggcgggaggacgcgacgctaaaggcgttcccggtccctacgaacagtcactgatgggaaccggaacccatccgctggtcaatcccaaggctccgctagagccgatgcgaaccatccactcctatgatccctgcatgtcctgcggggttcatattctagatcctgacggaaatctcctgggcgaggcggtgacctcatgagtacccccgacactccctcctcgaaggcgaccctaacagctgaaactgacccggctggggcacaggcagctgcagctgccacggccacaaaggatcatggaatcgagttctttggagacggcagccataaaacgcgagggatcgaggtagggggcggttttagctgctccgatatctcgatgcgacgccttttactaatggcagcggtttccccggcaggtagcactgatccggtagatgtcgccctaaaagattctcttcgctatcgatttaaacacggcgctcccaatgctgatattccggcagagaacttcgatcccgctaaagagcggcgttattctctggcgcggattaacgatatgaagcgcaccaagatgggcgagtccaaaaacactctgattgcgcggggtgacttggaatcggtcatgaacgtggccaaaccagagcgggcgctgcgtacccttctgcggaagaacgcacagatggcgggttcgcgcggttaccgctgcttaggggtagctaccgccactgtcgatgaaaacggcaaggttagccccttccagatggagggatttgtcaatgtacgtccggtgggtaccggtttgcaaggcgatgacctcactcccaccactgaagactgggttcgccttagtgtttggtcaggcagtctgcgtttcttgcactggctgaatgtattgctgattgtaaccttgtcagtcaccggatactacattatggatccgttcttcggggatacttttttccgcggtatcgacatcggctacctgatggggataatgcgttttatccacttcacagccggtttcacctggatagctatcggagctgtgcgggtggtgattgcctttgtatctaaagaccgttacctacgctgggaaactttctggccatttaagaagaaagaagactggacttatctaaaggagactttgggattctacctgttcctaaggaaagaaagccctctttatgtggcgcataaccccttacagcaactgacctacacttcggtttatgttatgggtgctttccaaatggggatcggaatggcgctttacgccctgccgcataagaacagcagcctcttctgggcgattatggcagctcccaatgactggttcggtatcccctttatgcggctagttcacgcgatgattatgttcctgttctggggtttcgtgattgcccacatctatttggcattccgtgcagattctctggaacgccacggaggtatttcggcgatgatttctggaggcgtatggatgcgtcgcacttcaaagccgattgacgcccccgaactataatttgaaaggcttcaatgaccccaggtgaaaaattgcctgcaacccctgtcgcaagcattgatcccgataacgtagcgggttttgcgaaaagtgccatcgattcggacggcaatagggcattacctgatctatctgcggtagatggtagtggttgggcgggcagccgtttcacagtcctggcagtcggtaacccgattatgggcgacgatggtatcggacttgaaatcctggcgcagctgcaacagcttttgcctcagcgtcccgtctggcaagcagccatagccaggggagaactggcactgctggaaggcgggacaaacggtatggagctggttccggtagtccaagaagccgagcggctgttaatcctggattcggtagccccgggcaatgggcgtgagcccggacaagccctccgtatgagcggggatcatgtgccacggctgctttcgatgaagatgtcgccccaccaggtggggttgctggatgttttaagttccgcgcgcctgaccgggaaagagcctactgttttggaggtcgtgggagtagttagcgaaaaagtagatttaaatttggggctgacccccacagccgcctcgggaattaaagcggcgaccgatttggcagccgaagtcctagattcttggcttaaatagctgcagcggtttcgaaatactttgcggttctagccagccgcggtgaagaccgcgggcgctccctagttaatctttatcccactccacccaggagatttcgaactcgcgcccatgactaaggctgccggtgggcattccgcatttagggcacagcagcgcaaagaactcgtcgatttctacgtcctcaccacagcctgggcaatagacgctggcggtaatggtattgacctcgagttcggcagagtcacaaatggtgcctgcccgggcgattggccaagaaccgtagagagcctcggggatagcgcccgacatggtgcctacatttagcgccactttttcaactcgggtaacctgatagttagcgtcagcggctgctttttctaccgctgccactaccgaagttaatagcccgagttcatgcatatactcatttttcccaggagagccatgaaaatcaaccttgatgaaatcatcgatcctatggaagggcgggtagtggtatcccatgattccgcaggccaggaacatgctcgctttgatctgcagggacttccgcgagttgacggaatgttacgaggaaaatccgcccgggaagccttgaaaatgaccgagcatttgtgcgggatctgcccggtagcgcatcacctggcgggaaaccgcgccttagacgtgctgagtaataacgctccggtatccgtggcggctgagctcacccgccggcttttgcattacggatctgtagtggaaacccattcgctacggttcttgctacaagagcgagatagtggagtggttttaaagaaaatctccaaaaaaatgctggtagctgcgggatctccggggcattttccagtgaccgctgtccccggtggagtgagtcattggccggaagtagaaaacttaaaaattgtgaaggaagagttacccgctgccctgcaagtggcgcaaaaactctgtgaccagggatttaaaaaccaagcgcagcctagtggattcggagaattcaccggggcagagctagctttaattgatgaggacgggaatccagatgttttcggaactcgggtgagggttgcgcgccagggaacaactgtaaacgagtttgagttctcgcagtggaacgagcaggtggcggaagaaaatccgggtgaggctgctccgcatccttatctacgcggaagtgatcctagcgatgggcgttaccgggtggggccggtagcccagctttcggtgggaactttgcccagtgacctggcaggcgctgcccaagaacgctggttaacgggcagtcgagatgccgctagtgcgcgcgcaatcattaccttgcacgtgctggaaagaaccggggaagttgtagaccaattattgcagatcctggaatccgcaagcctcgaaccctgtccgcaagtggggcagatacgttttcaacccgggtctgccaccgggctggtggatggtccgcgggggattcttgcccacacctactccactgatccccagggaatgattagcgcggctacgattcttaccccaaccgcccaaaatgagccctggctggccgagctacttactcaagcagtcagcctgcaggacgcaggtagggcagctgccctggaacaatcgattcgggaggccgacccttgcctgccaattagctccgccccggccggtcaaatggggctaaaagttgataatctctaaaggcagcggggatatcctggggttagaggacgatcctattttccgcaagaaaggatgtaagacatgtgcgtgggagtaccgtgcaagatcttatcgattgagccgggggtaatgcccatggggcgcattgatgtggcgggacaagtgcaagatgcttgtatggcttatcttcctgaggcgcgtgtgggtgactatgtgctgattcaaaacggtttcgctatgaaccttttaactgccgaagaggctgaggagtcgctggacacttggcgggatttagggatgatttcctaactgcagccagagaaaaactgtaacaagtggcaatcctttcaatatggtattaaattgaataattgaatacgcagcctattcaaaggagttatcatggcgtgttttatagttcccaccacggaagcaattgttgtaacggcggctaagaagcaaattgcgaggaaagcaaagaatggtgcctctcccgagagcacccagcgctcgctgaacctagttcgcaagctgacctggctaaccaacctgctatggggcggagccttgttgctggcttttgagcacttatggcatggcgaagtggttccctatttcccgttcctaacagctttgactgagcgttcaaccacccagcagatgctatttgaaatgggaaccaccggtgtaggaatggcagtgatagtgactgtggtttggggtgtaggagtagccctgatccgcgccaacgaacgtcgcaccagtcccgcccctgaaaagatcgaggcctaaaggattagcaatgaccctagtaattacgctttttgcagcaatttgttccaccgcctggtggtattcccacgctccccagtcaaagatgcgcgtagacctgctttgctggatgtattggggtgccgccctgatgtggacggctgacctggtcagcgaatatatcgcagagggcgcggatgttttcgtgcctccagtcaaagatatgctcaacgacacctatctaggtctgttcgtggtagccctggccggcatcgtctggatcggttacctaattgtcaaggatccacggggagtacgcaccgcacagcttgcccagcgtgacagtgaggccagcatcgatgcgaaagagttagtggcttcccgctaacccgtaagcagcttccccaaaagggaaacttgcggaataaataaataaacccaataactgcgcgggcagatactgataaagtatctgcccgcgctttgttatatctgcagtagctaatgaacaggcactagctctaataaacgcggggagttgatttttcctctcgcattgggtcgggtcgtaaaagcgctcgggggccccggtgatcctcgctgcgctcggctcaagtcccctctcgcatcttttacggctcgacccttacgtaggtggcaccagcgagcgcgggggataacttttatccgagtgggtgcggtgggcataagaattcggaaaatgcctgcggtctttttccgaattcttgggcaggaggaaaaagttatcccccgtgatcgctatctgcagtcgcctaactaagcaggggaaacggctaacaggcggaaacctttcttcgaggcgaggcggcgagtggggaatccctgcgcgcacagccacttttgcatcgaatctgctcccaggttcttccccattaccaaaatcgcctttccatcgggttttagaagcggtaaccaggtgagcagcagctcttgcagcggctttttcccgattctaactggaggattagaccagatcagatcgagtcctccagcagcttttgcggccgccagtatctgatcaggcgagcctacctgcagtgatacccccgcgcgctgggcgttagtgcgggtaagatcacgggcgcgttcgtttacgtcgactgctaagacctgcgcggctggacttaaaagtcccaaagtgatcgctaacggcccccagccgcaacctagatctaaaaaagtcccggcagcagggggagtagaggcacctgccagtagaaccgcacttgccttatctaggtggcgggcagaaaaaactccttccgcaccctccaaaattagttctttgcccgcgagcgatactttgatcttggtgcgttcctcagcattagctgccggttgatccgaaaaatactgttccatcacctctagactattgtttttgccttcttaatgcgcggaggtcatattatagggctagcaaaggttgccaggtacctaactaacctggcagatccaggtaggtgttagctgaaaggaaggcggtgccgggtggaaactgaacccacgcaaatcgacagcgtgctcaaccagtacgtcaccgcctatgctcggattgatccttttaaggcaaccgaatggggaatctctggttatgatgctttcttgccagattattcccctcccggaatctccgaacgctacaacctgcgtaaagatactttggcgcgagtggcaaaaaccccgaagcctacgcctcgcgaacagcgagaagccgaaggtttcaccctgctcgcccgcaccgaacaggaaaagtttgaagccggtttcttagcctctgaaatcagtggcactagctctcctattcaggtctttgcggaaacattcaaactgatggatgtgacctcggaggcgggggtgggcaacttgacccgcaggttcctggcgctgccgcaagcctttgaggggctgagaaccaccatgcgggaatctcgagatcgcggttatgcttttccgcaagaagccttggagatggtgctggggcaagcacagatactttctgcccccgagcatggtatttatcagggtaaacgcgcggaaatggccgatacccgactctcacaaatgggggagcgtgcctttgaacggggaatagccaccgcccaagctgctttttccgaaatggcaagctttttgcagcaggaaatcttgcccacctgctcgccaatcggagggatagatccccactcttatttcatttcactgctttgcgtgggggtgagcgaacctgatccggctgagtttttcaagacagctagtgaagatttagttcgcctgagagcccaacgcgaccagttgcgcagtgaactgggggataaacacgcctatcgtctctcagacctagaagttgctgatgggtttaacgtgctgacctgggcgatggaggatgcgtgggatgcttttcgcattaatgtagacccggagctagctcagctagttaatccccaggatgctccgttaaagtgggaaaacgatccgcacggctgccttgttcacccctattatccagcgggagttagcctatccagcagttcgcgggttcttccccgcaagtgtgctgccagtcgggcgccgcacgcctacgaaagcggtgaaaatccggcggctattagcggcagcgctttcgattctttcctagaaatagaagatacctattacgcactcgccgccctggaaaagggaatccctggcagccacctgtattcgcgggcgcgggaagcctatggaacgaatctatttacccggattgccgcccatttgcctgcctccaacctgggctgggatcttttcgccctagaaatggcgccagaactttgggatatacccgcagagattagtttgttgatccaggaacggattatgcgatatgtggctttggccttagctgatctgcaattatatggcggtcaaggggagggcgaatcagcttggggattgccggaggcgatcgcctacctgaatgatacggtttcaggtccctggaaccaggtactcttgcggcagcgctacctggggattcccgccttgagcctggctccctggtacggttggcgccgttggagagaaacctaccaccagttccaagccgcaggcggcagtggattcgctgactttgtgcggaaagtgacacctgcgggggcagtacattttaaggttatccagcagatgctctgaccccgaaaacctaatctaagctgtgcttttattagcgctaaccgggaaagataatgttgcgttcgccgggttgaaaagtttttcggaaaaaatgccgccgatagagaaaataagagattatttctgcttattttggaaaaataatagccaaacacgcaaaatataaactaatagtaataaatcggtattattaaagttaacaattttggttttcagaaaggctgaggatgactatgcgcagtcgttggcttcccctggcagtcctggcagcagctctgctcgccggcgggactttgaccgcttgcagcagtaataactcgcaagaaaacgcagtagaccgggtattgattaatggcgaggaacctgcgcggggactaattcccgccgctgccgatgatgacgccggaatcaagatcatcgatttactatttgccggcctggttacctatgaccagcaagggaaagtagtaaatgacgtggcgcgggagatcactgattctcccgaccacaaaacctggactattcagatgaacaccgaccggaagttttcagatggcaccccggtgctagccaagaactacgtgcgcgcctggaaagcatctgctgcccaaaaactgggagcgaccaccgcttttgaggcaatcgaaggagccagtgaagatggtactggaaacctcagcggagtaatggctaacggcgactacaaaataactatcaaactgaaacgaccagtggctgatttttcgaatcgtttgggaatcaacggcttttacccgctacccgatagcgcgtttgacgagaacgggaagatcaaaaaagagtttgggcaaaagccggtggggaacggcccctatactttggttagttgggagccctccagtcggatacagctggataaatccaccacctaccgcggtccgcgccaggcagataatgcggggattgaagtgaagatctatgcggatttttctgccgcctaccaagatttattggctggaaatctggatgtgctcgatcagatcccagatggggaactccccaatgccaagaaagatttagggaaaaaccgtaccagcgcagtacaagctactatgcaaaccttggatattgactaccagaccaagcacttttctggggaagaaggcaaactgcgtcgccaggccatttctcaggcgataaaccgggaagagataatcaaaaccatcttttatggcacccggaaagcggctactgatttcttaccgccgcaaatcttggggcatatggatgctggccctaagaaccaggtgcttaaatttgatgccacggccgcccagcaggcttggaaggctgccgatgagattagcccttggcagggggagttaaaaattacttataactccaacgagtccaatcaaccctgggtagatgcaatttgtaaccagctgtctaacaccttggggattaaagccgtgggtgaccccaaaccggatttcaagacgcttatggaaatgatggacgaacattcctttaccggaccgttccggatgggctggtcgatgggctatccctccccgaataatttgctagccggacgctacgtcaagggtggcaatggtaataaaatgagctacgcaaaccccgaatatgccgagcttttgacgagggcgcaggctgccgatagtcccgaagctgcaggaaagctctatgaacaggcgcaaacgctgctgttggcagatttgccctcgattccgctctggtctcccagctccaacatcggttttagccagcatgtgggcaatgtgaccaccgattggaaaggtggggtagcttttcataaagttacgaagaaataactaactcggaggttacagtggccaacaaccaggtttcttcagatggcaacgaacaacaggaagaagccccgcagcttcaccgtaagctaaaggcgcgtcacctaaacatgatcgccatcgggggagcgatcggtaccggacttttcgtagcctccggtggcaccattaccggagccggtcccggcggcgccctagtagcctatggagctatcggcatcatggtgttcttcctaatgcaatcgctaggggaaatggccacctattgccctacctcaggtgcatttgaagttttcgccacccgctatgtctctaagtcttttggcttcgcgcagggttggaactattggtataactgggcaatcacggtagcagccgaactggttgccgccaccattgtgatgcaatactggttcccggagtcggtggttcccgcttgggtttggtcactgttattcctggtaatcctatttgttctcaacgccttcacggtgcgcggtttcggggaatcagagttctggttcgcctccatcaaagtaataactgtaatcatcttcctggcgctgggcattttgatggtgatggggattttggggggtaagtcccccggatttaccaactttacccgcggggatgctcccttcgtgaacggtttttggggcattatgggggtcttcatgattgccggtttctcgttccaaggcaccgagatgattgggattgccgcaggtgaaacccaagatccggaaaccaacgttccccgcgctactcgtgcggtattcgtgcggatcttactgttctatatcggcgcgattgcggttatctccttcctgattccctacactgatcctgcccttttacaaggggcaagtgcggactcagataccgcccaaggcttcactgaggccgtcaccaagtctcccttcaccttgctatttgaacgagcagggattgcgattgcggcgggagtgatgaacgccgtgattctaacttcgattctgtctgccggtaactccgggatgtatgtggccacccggatgctctactcgttggccaaagaaaagaaagctcctgcgatttttggtcgtctgaccaagcacggagttccgattgtggcgctgattttcacttccttgatgggggcactctgcttcgcgacttcgcgggtaggtaccggtcaggtatatgtgtggctggtaaatgcttccgggcttgctggttttattacctggatggggattgcctggtctcactattgtttccgccgcgcctatagagcgcagggtaaaccggtggaggagctaccctataaagcgttgttctatcccgccggcccgcttattgctctggcaatgtgtgccatcgtggtggtggggcaatccctaactgtgattaccggagagttctctattttgggtttcttagggatttacattggtttgattttcttcttggcgctgtggatcgggcataaactggttacccgctgccccgcagttaaaccggaagaagctgatttatctcgtcacgtgtaggcgttaatagtaaaattaacgttctgttttagctgagggtttccagggaagtagtttcataaacgctgactaattactattttaaccgttattacttagccaagcctaagtcgagaaaatcttgggatattgtaaaaaaactaactttcaatgctatatttggctgtgatcgtgttaacgattttgctgatacatcagctttcaaatataagcaacaagcttggaggcaatagtgaaacgacggggcgcattagcccttgcatctgcacttgctctttccctgggactagccggctgctctgctggctctgattccaagggcgctgacgaaggttcagcggcaaatgcggatagcaaagggattattaccgtaaacactgtagaaccacaaaatcccctgattccgacttctaccaatgaaactggtggtgggcgtgtcctggacgcgctcttctccggtctggtctactacgaacctaagactggcgaggccaagaacgaactggccgattcgattgtttctaaagatcaggtagtttggaccattaagttaaagaaggatgccaagttctcggatggctcgccgattaaggccgataactacatcaaggcctggaactacggggcaaacccgaagaacgctcagatgtcttcctctttctttgaggcaattaaaggctttactcccggtccggaagaagaaggagccccggctcccgatgttcccgaactgtcgggattaaagaaagttgacgactataccttccgggtaactttgaatcagcctacttctgactttgcgctgcgcctgggctactccgcctacgtgccgctgccggatgtggctttcaaagatatgaaggcctatggccagaaccccacggttacctccggtccttacaccctcaaggataagggctggcaccacaacgaatctattgagctggtaaagaacgacaagtacgctggcccgcgcgaagccaagaacggtggactcactttcaagatttacaccaagtctgaagccgcctatgccgatgtacagtccggtcagctggacgtactcgatgatgttccagctgcttctatgagcaacttcgagtctgatttcccagattcaagcatcaaccagccagtggctatcttccagtcattcaccattccggatcggctagagcacttcggcatgaatgaggaaggtcgcctgcgtcgtcaagcgctttcttacgctattgatcgcgagagcatctgtgaaaagattttccagaagactcgggtaccggcgaaagatttcacttctccggccatgcctaactacaagaaagtcttgaagcaagttaaaggcaccgaggttttgaagttcgataaagccaaggctaaggaactgtggacgaaggcggacgctatttccaagtttgatggcaagtttactattggctacaactcggactcctcccataaagactgggtagacgcggttaccaaccagctcaagaccaacctgggtattgatgcggtcggcgatccttacccagacttcaagggactgcgcgatgccattacccaggaaaccattaagggtgctttccggtctggttggcaagctgactacccgggcatgagcaacttcttggagcccctatactccaagaacggtaactccaatgatggtaagtacgacaacgagaagttcaacaagctgatgctggagatcgcgaaactgccggtaggtgacgcacaggacaagaagtttgcggaagcgcaatcgattctgttcaccgatctgcccgccatcccgctgtggtactccaatgttctaggcgtttggaacaaggataatgtttccaacgttgccttcaactggaagagtgaaccggtttactaccagatcactaagaacgccaaataaggtgaaaaccgcaaacaaactgttataaacacagttaatgggcgggtcgaaaggtaataaatacttttcgacccgcctgtggttttttatcgagggctttaacgcgataaggtttaacacagcttatagtcaaggagagacctatgctcagatacatagggcatcgtctactacagatggtcccggtattctttggggcaacgttgctgattttcgcgatggtgtatgccatgccgggagatccggtgcaggcactgggcggagataagggactgcccccttcagtagccgcccagattcgcgcggaatataacctcgataagccgctttggatgcagtacctgctatatctaaaaggaatcgtaaccctagacttcggaaagaccttctccggaagagaagttacggaagtaatggccaacgccttcccggtaactatcaaattggcttttatggcgatcatttttgaggccgtaattgggattttctttgggttcttcgccggactcaaaaaaggcaaactttttgactctaccgtgctagtgatttccctggtagtaatcgcggtgccgaccttcgtgatcggcttcttgctgcagttcctcctaggagtaaaactggggtggctgcccactacagtaggggcaaacgttagtttcgaatccttgctaatgccggcgctagtgttgggggcagtttcttgtgcctacgtcatccgtcttactcgtcaagaggtttcggaaaacctgaccgctgacttcgtgcggactgcccgggcaaagggaattcccgaatctcgggtaatgacccaccacgtgctgcggaactccctgattccagtggctaccttcctaggtggagacctgggagctctaatgaccggcgcgattgtgactgaaggtattttcgcgattaacggcgtaggaggtaccctctaccaggctattttacgtggcgaagccgccaccgtggtttccattactactgtgctggtgctggtctatatcgtcgcaaacctgctagtagacctgttatacgctgtactagacccgaggattcgctatgagtaaccaactacttcccggacaaaaacatttcgttaacaaggtcgatgaaaccggcctgggggcagtcgatgcggtagccgatgaatcggcgccctcctcggtgtggggcgaagcctggaaacagttgcgccgccgccccctcttttgggtggcattggtgattattgtcttggcagtgctgatggccatcgtgccccagctgtttacttctcaagatcccacttactgcaccctggagaattcgattgaggggccgactaaaggtcatatttttggattcgataagcagggctgcgatctctattcccggattatttacggggcgcgcgcctcgatcgcagtagggattttctcgacccttacggccactattatcggggtagtattcggcgccctggcagggtacttcgggggaatcctggacgcgattctgtcgcggatagtggatatcttctttgccatccccatggtgctggccgccatcgtgattatgcaaatgtttaaagaacaccgttcgatctggatggtggtaatcgtgctgggggtctttggatggacccaaatcgcccgtattacccggggcgcggtgctttcgattaagaacgaggaatacgtaactgcggcgcgcaccctaggggtatccaatatccggattctactgcgccatattttgccgaatgcggccgcgccggtaatcgtctacgcgactgtggcgctgggaacctttatcgtggcggaggcgaccctatccttcatgggaatcggcttgccgtcctccatcgtttcttggggtggagacatctctactgcccagcaacagctacggactgcgcctatgattttgttcttgccgtcaatcgccttggcgctgacggtattgagcttcatcatgatgggagacgtaattcgtgacgcgctcgacccgaaccagaggaaacattaatcgtgaatcaaaataaccaaaaggatcagattatggcagctgactcggatcagactcttgccgaccttagcgtagctaacgctggtaaccctgctgcgcccgtacccctgctggaagtaaaagacctagaggttaactttcaatccactaccggtgtggttccggcggtgcgcaaagccaatctcactctctaccggggacagacggtggcgattgtgggggagtccgggtctggtaaatctaccttggccatggcaatcatcggactattgcccggcaccgggaaagttgccgggggatccattaaattcgatggtcgcgaactgaccagcctgactgaaaaagagatgcaacaggtgcggggagcccagattgggatggttccgcaagacccgatgtcgaacctgaatccggtttggaaaatcggttcccaggtggcagaggctttgaaatataacgaagctaccaagggcgggaatatccacgagcaagcgatgaaagcactggcagatgcaggtctgccagatgcagaggcacgctccaagcaatatccgcatgagttttcggggggtatgcgccaacgtgccctcattgccatcggtttggcggctggtcccaaacttttaatcgctgatgagcccactagcgccctggatgtgactgttcagcggcgcatcttggatcacctggaaaaagaaactcaagatctaggcacatccaccctgtttatcactcacgacctgggactggcggcggaacgcgcctctcacctggtggttatgcaccgtggtcgggtagtagaatccggacccgcgcgggaaattttgaatgatccccgccatccctataccaggcgtttggttaatgcggcgccctcgctggcttcccggcggattgaaatcgattattctccgcaaaaagcagaggaaatgccggacactattgactcgcgcacttccgcagatgtgaatctggcggtggccgcatctaaggattccgggaaaaaggtgatgggcaccaatgtcttgggagaacccttagaaaaacaccttggtgacgaggtgattcgggtcgagcatctggttaaagagtttgatattcgggggcaaaagggaaagaagaagaccttccgggcagtggatgacgtgtcttttcaggtgcgccggggttcgactttggcattggtaggggagtctggctccggtaaatctacggttgccaatatgatattgaacctgctggatcccacctcggggaaggtttattacgagggaatcgacctgtccactttgcgacgtaagcagctatttgcgctttgccgcaagatgcaggtggttttccagaatccttacggatccctagatcccatgttctcggtttatcgctgcattgaagagccgctgcgcacccaccacatcggggatcgcgccaagcgagaaaagcgggtagcagatttgctggatatggtggcgctgccccgcagcgctatgcggcgtttcccaaatgagctgtctggtggtcaacggcaaagggtagcgattgctcgcgccttggcgctgcgcccagaactggtagtgctggacgaagcagtttccgctttggatgtgctggtacaggatcagattctgcatttgcttaatgagttgcaaggacggctcggactgacctatttgtttatcacccacgatttagcggtcgtgcgtgaaaacgctgacgatatcgcggtgatggagcagggcaaactggttgagtacggcaaagctgacgatatcttcgccaatccccaaaaggaatacactcgcgaacttatcgaagccgtccccggtggcgatttactcaaggctcgcaccggataccaggtcgaataatctgctttttccggcaggtttctgccgagaaaaccgggcagactcgaaagcccgggtgctttatacctaaaagctggcagctccaaaacgttttgcactttgagatgaggataggcgtttaaaaggttccgttaggtgctctgttaaactcgaggtatcttgcaggttcgacctagagaaagattcccaatgaagctgaagaaaacgctattaatgctaaccggcctggtaatggccctatcgctttccgcatgtgcaggaggctcaggctccgcagatgcggtaaaagctaaaggtgatgacttcaccgtaggctttgacgccaactttccgccctatggatataaagataaaagcggtgaatatgtaggtttcgacttggatcttgctgccgaggtggccaaacgcaacgactggaaactgcaaaagcgggcaattgattgggattctaaagatatggaactcaagtcgggtaccatcgactgcatttggaatgggttcaccatgaacgggcgggaaaagcaatacactttttcgaaaccgtatgtagataactcgattgtgttcgttactaaagccggatcggggattaattccactgcagatttgaaaggcaaaaccgtgctggtacaggtagattcttccggtctggccgcgctgcaagataagaagaacgcggatttggtagccagcttcaaggaattaacccaggtcccggactacaataacgcgtttatgaccctagaggcgggagctgcagatgcggttgcagtagatattggggtagcggattaccaactggagcaacgcgggaaagacaaattccagattatggaaccgcccttccataccgagcagtacggcatcggttttaagaagggtaaccaagccttgcgtgaccaggtgcaaaagaccttggacgaaatgaagaaagacggcactttcctgaagatcgctaagaagtaccagctagaaaaagcgattgttactgattagttcactgcgtaaaacatgacacgctaacgcagggagcttaggggtaatggatttatcgttcttgccggaactagccggcggtatgctacaaaccttcatcatcttcgcgctcaccctagttttatcgctgccccttgggctggtggtttacggcgggagagtgagccgttttaagccgctggcctggtttatacagttctatatctcggttatgcggggtacccccttaatgctgcagctgctggtggtgtatttcggtcccttcttcctctttggaatggaaattggagcggcctaccgttttagcgccgtgattattgctttcgcgattaactacgcggcctattttgcggaaatctaccgcggcggtttccaagcgattccggtggggcagtcggaggccgcctttgtcctgggctattccccggcgcgcactttcctgaccatcaagttgccgcaaatgtttcgtacggtgttaccttcgatcactaacgaggtaatcaccctggtaaaagatacttccttagcttttgcgattgcctacgcagagatgtttacgattgcgaagcaacaggccgccgccagtgcttctatgcttccctttgtggcagccgggatcttctactgggtgtttaacctggtggtagcggtagtgatggaacggattgaaaaacgcatgggaagctacaagattaggtgaaattatggaagcactaaaagtcaccggtatggaaaaaagttttggcactaatcaggtgctgaaaggggtgtccctgactgtcaataccggtgaagtgctagcaattctggggccttcaggttctggaaaatctacgcttttgcgttgctgcactttcttagaagaaatggatagcggagaaatctgctatttcgggaagcaggcgttaaagaaagaggacggagtcaaggtttcctctggtgacgagcgtgagtttcggcgcgactttgggttggttttccaagactttaacttatttccacactggacagtgctgcgaaatctcactgatgccccgataaaggtacagggaaaaggacacgaagaagcccaagaaacagcgctgcaactgttgaaaagaatgaacctagccgataaggggcaggcctacccctctgagctatccggtggtcagcaacagcgggtagccattgcccgggcgttagcgttaaaacccaggatgctgtatttcgatgagcccacttcggccttagatccggaactaaccggagaaatcctacagatcattcgctctttggcagcggaggatatgacgatggtaatcgtgactcacgaaatggagttcgctgccgaagtcgctgatcgcgccctctttatcgataacggggtggtattggaatctggggatgccaagcagctaatccgcaatccttcccaggaccgtacccgccagttcctaaataaactacgcggacaaaattcctctggtatttagtattccccggactcagcaggttttaggcaaggagatagcaaggtgagtgaacctaaagatagcaatcaagaaaatctgccgcaaaacccggatttggcctccccagctggcagcgattacccggtagtttatcctcccgatccgccgactgtgcccttcgcgccagtgcctgcccccgggcaaggacaacccggggattattcctatccgggaggatacccgcccgcaccttctgcttacccgggcgcctatccgaccccgggagtaaatcaggcagcaccggttccacctagttattcgggcaaccccggtttttctccgcagccaaatttcgtgcagaaccctccctatccgccggaaccgcctgctccctatccctcaaacagtcagttccctccggtacctccccagcgaaaaaaaccgggaaaaaacgctgtaatcatgatgttggttgccttagtcgtggtgttggtagcggcgttgactctgggcggtatctgggtgtaccggcagcattccacttctgctttagaaaatggaattgtgcctactgtaactaaaacagtagtggtgataaaaaaggtggagataccggaagatgctgccagtgatgccccggaaaatcccctctggtatccgcttagaatagatgatcgctacacattggtaatttggtataaatttacgaatcagcagcttaaagggctgagctaccaggcggtttcgagtgaaaatggcaaaaaagttgctattgccgataccggaataactctgccggtgaaagacggggaaaatctgccgaaatgcccagattcccaacgctaccagataaaagataaaaccttacagtgcgctgcagtaaaaacagttaaaaaggatagtttttctattccccaagccgggaaagagagcggcgacaaagattcctcctccaccgctaaagacagcaccgatagcgtaagcggagaaaccctgggcacggtgggcaatgtccggatagtcgcctccccttccgcgttgcagactaataccattttcgggatagattcggacgataacttgctttggtcaaaaactttaaagcaacccggacgcagcgttttatccggtgaaaaactctcgatttttaactggaacgaggacggtaaagttaccaacaccatctacattggagctaagaacgccgataagtcagacagcagctccgctggcgccactaccaagaaagatgccatcaagagttttgatttcgccaatacccaatggtcgctgccacgcaaatatagctctccagagtgccaaatctatcatgaagataaaaagagcgaatgtgcccaacgcgaaaactaccagtttgaggacgggaagtattttctcactagtgagcaggagcaacagataaagcaggagttggatatcgacagttcaactcatgaaaccgatcccatccaccggctgtggtacgggcaggtggatgaggataataatcctaccggagattacagtgtcgaatatctagatatcaatgatgatggatacttggatgcggtcgtgccggtggtttctatatcacctttcaatagccaaatggatatttcttttagctattacgtctgggtaatgaatcccgttaccggggtgccagagcaaacaaatactccgatttatttcgggggtcgttgttctgaaacttatgagaacgtggaaatcaaaaaagatggagctactccacgactaatcgtaaataccatgacctggggcggggatccttgctgcggatgtgatcgggatgttcccaaacaacgcagcacctggcattatgatgccaagcgtcacgacatggtgtgtgaccaggatgatggcgataaagtcgatggctagagcaggcgagctcttagcaccctcggaatccctaagtccgtagctaacagccgggtagcttcgcagctatttgagttaccaggtttagctagtctgcttgtacctgcgccatccaggcttctacgtcctcaatagtgcgggggatatcttccgacaagcggcgtacgctgccatcagcttccactagcacatcgtcctcaatcctcgctccgatgccgcgcagttcctcgggtaagagttgatcgtcctggtggaaataaagaccgggctcaatggtgaaacacattcctggctctagcagggcgtccatatacatatcccgggcagctaaggcacaatcatggacgtctagccctaagtggtgggagaccccatgtggcatccagcgccggtattccccgccgtcctttgacagggtctgctcggcacttactggcagcaccccccaggcatccaagtgtttaactaaagccgctactgccgcatcatgtacatctttaaacttgcatccgggtttatttgcttgcgctaagcccgcttcacaggcatcgagtaccgcgttatagaccttggcctgcaccgggttgaacttgccatttaccggcagggtgcgggtgatatccgcggtatagagagaatcagcttccactccggcatcaattaaaatcaggtcgccttcgcgtactggaccgtcattgtcaatccagtgcaaagtatttgcgtgattacccgaggccgcgatggtgtcatatcccagaccgttgccttcttcgcgggctcgagcctggaaggctccttctattacccgttcgccgcggtggtgctgggttgcgcgcggcagcgccctaatcatggcttcaaaccccgatttagtaaccgcaatcgcgtgttctagttctttgacttcggctgcatctttttgcaggcgcagcactgaggcggcctcttcgagtttttcgtccaggcctcgcgcgtcctctccagttggcaacccggcttcgctacgtactttttctaccgccgcctgcagggaagtatcgacttcgcgaattactcgcaactgcactagaccagcgtctttagccagttgatcgggcagagtatctagggggcgcgcctccagtccagtcaccgcttccatctgcgaaagcgtcatccgtggtcccacccaaaactcgccataggtggagtcggcataaaattcttcgctactgcgcggagcttggggacggaaaaatacgatcccgcgatgggtggctgcgccggtattttcgggggcgttctctaggggcgtgccttctttatcggtgagcggttccaggactagagccgcgtcgggttctagttccccgcccaatccggtcagatgagcaaatgcggagtgtgcccggaaacgatagtcgcaatcattggagcgtaccttgtagttcccggccggaatcactaggcgttcccctcggaactgggcacctagtttttgataacgagcagcgaggaagtctcgagcgtgactgggaataggatcgggatctttgcgttccccccagccgctgccaataaattcccgaaaagcgggggtgccgatgcggcgagaacggttatttacccggtcttttaagggttgatcttctgctgctgctattttttcttccatacttccatcatgccatggtgacttaaaatagtcctatggcggttgcgcggattgatttacatactcattcttcctgttcagatggcactgatgcccctgcggagttaatgacactggccgcgcgtgcgggtttagacgctatcgctctcaccgatcatgacacctttgcggggatagctgacgccagcaaaatggttccagaatgtggagttaccctgattccaggggtggagatatctacctcccatcagggaatcactgcccatctgctggcctatttgcctgatcttaacagcccctcgcttccggatttatttgaaaaaacattacaggcgcgccagcagcggatgcggcaaatggtgcagcgtttatctgcagattttgatatttcttatcaggaggttgcccagcaggctggctcgagccccatcgggcgaccacacgttgctgatgttttggtgaaggccgggtattttccgaatcgctctgccgcattcgagcaggtgctagctacttccagtaaatactatgtgcactatcaggctcccgatactatctacgcggtccagcaggtaataaaagccgggggagttccggttctggcgcatccgcgagccggcggccggcagcgcaggttcttatcggtaggcaccatttctcagctaaaagaggcgggattatttgccctggaggctttccatcccgaacaaaatccgattgaacaggccgaggttagtgaaatagcgaagctgttgggactggcaatcaccgggtcttcggattatcacggcagcggcaagcccaatcaactgggacagtgcctcaccgatcccgaagtattcgctgaagtctgtgaaaaaggagcaggaacaccgttgcgtccttgagaaaagataggagggagctctcactctctttatcgccggggaggggttgctactagagtagaggtcatgacagtaacttttcgagattttcgtccgcaaaatattgctccggtttcattggcgtctctagtggagggctttgccacccaaattgatcccgcctgggagaatgttcaggtgcggggagtgtcaatggcttcggatgagatccttgcggaagaggcctttatcgccgtaggcggagcgaatgtgcatgccgccaagttttccggcgaggtagaatccctgggggcagcagcgattattactgatgccaaaggtacggaaatcgccagttctcaagggctaaaaataccggtggtaacggtagcggatccgcgcgaagccgcctcgcccctagcaatcagggctttcgataatccggcagggaaaatgaaaaccgtagcggtgaccggaaccaatggcaaaaccaccacttgttttgctggcaaagccgcttttgaagccgccggtatgcccactatgattctttccactgcggaaactcaggtaggggatttacggattcaatctgcgcgcactacatttgaaggtcccatgttgcagagaatcttggcttacggggtagagcaggggatgcaggccgcagtagtggaagtctcggcccatgccttggctttagggcgagtcgcaggcatgaagtttgatgccactgcctttaccaatctgcagcatgatcatctggattattttcacaccatggaaaactatctggcagctaaagcgcggctgtgttctaaagaatttacggattatagcgtgatctgcactgatgataagtgggggcagcagctagctgccaattgcgacaccaataaggtgacggtatctgcctacgatccggcggcgcaagccgattgggtagtaacccgaaaagttaacaatattgcccacgcagcctgcgattttactttaaccgccaagacggaaccgaatattggccgcgaggaagaaatcaccgttgccttgcccggggaggttaatgtacaggacgccgcgatcgcctatctcatggttaccggaattgggattcctgcgaaggctgcgaaagcgggcttagcgagcctggccgttcccgggcgcctggaaatcgtcagccggcgtaatgaaggaactccgctggtgatcaatgattacgcccacacacccgaggccttagcttcgattctgcgcaccatgcaagagttcacgcccggaaaactacacctggtgttcggtaccgatggggatcgcgatgccaccaaacgggtgccgctagcaaaagtggctgctcaagaggcagatatgctctgggtgactgatgaaaatcctcgtaccgaagatgcggaaagtattcgtactcagctgctatctgggattaaagaggaacgccccgggatggaggacgtttgcgagattactacctgccggcgggatgcaatccgtaaagccattttggcggccggcttggacgacacggtaataattaccggtaaaggcgcagagccctatcaagaaattgagggagttttccacgcttttaatgacactcccgtggctcgcgactgcctagctgcctataagaaccgcgctcacattaaagggtaatgcctttaggctattccccctctgcgtttagcgtttctcgagggtgcagtcagatttcccgcactcttgggcgggctcatccctacttgaagtggctattctgataccaagtcaaagtcgtagctggcaccatcatctaaggtatggcctacggtgcagtatttatcgattgcttcttgggatttttgtcgcagctgtgctacttgctcctggctgagaatagatagatcagccaccatttctactgtcagatgcgaatacgaatcacggcggtcatctttatcagcagctacccccacggcggcctcaaaatccttccctaaagcggcagcgaatacgtgatcggcggaaaaagtgtggcaggtagccagtgccagttgcagcagctccccgggagtgaactggttttcgcccattcctatttctactgttgcgccccgctcattttgtcctacgtagtgcttcttgccttttcgctgtgcccacagaatcttactcatgcctatattctgacaggaaaaagcagtacgtgcagccaagataaaaaatcctgcaaccttttggttacaggatcttccttagtagcgggggctggatttgaaccaacgacctccgggttatgagcccggcgagctaccgaactgctccaccccgcgtcggcttgtctatggtaagcaggcgaggcggataaacgcaaaaaaattcactgtcgaagaggtcacgttggaaagctacgagcctaaaagggcagttcaagggggaatatgcgaaaaagacagcgccaattaaggctataaaaactggcaggtggagattaatatcggggcaataaccgtagagattaaagaaacggttattttatagcgcccgcaagacagtaacgacttttcctaaaatagtggcattgtcaccgggaatcgggtcaaatgtcgggttgtgggggaggagccaaatatgtccctcgcgacgtgccagggttttcaccgtggcttcgccatcgatcatggcggcgacgatttcaccgagttctgccacgttttggcggcgcacaatcacccagtcgccatcgcagatggcggcctcgatcatagagtcaccgtgcaccttgagcataaagagttcgccgtctccggtaaaacgggtagggatagtgaaaacgtcctctatatcttgttgcgcatcaatgggggtaccggcggcgatttgtccaaccaaaggaaccgcatgatggtttaggggggttacttcccctagttgtgcaggtgctgaggcaggagccggttcactggacgaaagtaccgaaaattgcgggttgacctcgagggcgcgactgcgtccagcggcgcgcaccaggaaaccctggctgactaaattgtccaggtgatgtttgaccgttgaggaagaagaaagacccactgcagtcgcaatctcccgtactgagggtggatagccttgagcccgaatcccggcacagaccgcttcgaaaatagagcgtgcgcgcggacgtaaagttcctatatctaagacgtgatcttgctgtttgctcatgttccctcccactaataactcgatcataagaaattgtgacccattatgcaaacatttgttcgataaatttgcatttttcgcttgatttcctgatgtctactcgctactatatcaaacagatgttcgacgaacgtttgttcgagaaaggtgtagccatgtccacacagctttcctttgatttggaagaactcgctcaaaagcgggtagtgggattgggggactaccagttgctaaagcaggcagcggtaaaaccctcgcgtccccgtctgcaattggtggacgccacctatatagaacgtgcacgggcaaagacccggcatcctgcgggctcaaaattgccttgcccgcccgccgtcggtagggagaaccgtacggcaggagcggcagcagcttttgactcgcttccacagtgggcgcgccggacgcctcacgctgatagcgatcactccgtttctttggcagcggttcctcccgttgctagggtggaacagctatcggcggtgcggcgtccggctccccaaaaggctattcctcgcggcgccccggttcccgcgattagtggccggttagccaaagtttctttagtcctgctttttgctgccggggcacttattgccggtgctgggatcggaagtttttgggattctgtgacctccagtaacggggaaatttcacaggtgtcggaggtcggcgcctctgcaggtaacagtgcttcgtcggccgatctacttctagggcagtaagcggattactgctcgcgaagtccgacccacagttttttccgggtctaggcgggtactttttaagtctgatttatagtttcgtcatcgccgttctgagggcattggtgcgagagtgtcatatgttgcgataagctagacctccaggttgtttattcatgggggaagccttgcactgtccgttctgtcataacgatgattcccgggtgattgattcacgcactgctgaagacgggaatgctatccggcgacgtcgggagtgtacctcctgtaataaacgatttaccaccatagagtctgcggctctttcagtacgcaagcgttcggggattctggagcctttttcgcgcgaaaaagtagttagcggagtaaaaaaagcctgccaagggcgcccagttagcaacgatgacctcgcaaagttagcgcagcaggtagaagaagacctgcgggctactgggaaatcccaaatcgatagccattcgattggacgcgctatcctcaggccacttagagaactcgacgtggtcgcctatttacgtttcgcttcggtatattcctcattcgatgatctggatgatttccaggccgccatcgacgaaatccgagcggagcaaaatgaagctagctcagagacaaaacccgcagaccgatagcctccggcattgaacggatctcggctaccgccgagaccggaagctcagaagcaatatcggtcagtgcgtagccaacttccccttccgttcccaggatctggccgttaatatttacgttttgatccgcaaaaacctggttaacccgaccgagaacaccaggaatgttgcggtgtaaaaatgccagacgatacagagaattatcgtgggtcgaaagatttagattcggcatattaacgctcatctcagtgctacccaaacgccagtagtcagcgattttatgcgacacgaactgcccaatatcgaactgggcttccaaagtggagcccccgatatgcggggtcaaaatagtgtttggcagccctagaagcggggagtggaactcgtttccattcttcttcggttcttcgggataaacatctatcgcagctcccgaaatcttcccggaacgtatattttctgcgagggcgtccacgtctactactaaaccgcgcgacaggttaatgaagattgcgccctctttcattagttcaaactggcgtttcccgattagaccgtcattggatttgcgtccgtcgacgtgaaccgaaataaaatcggcagttttaagtacctgatccatagatggcaaagccctagcattgcccattgctagccgctgggcgcagtcgtaaaagactacgttcatccccatagcttcggctaataccgaaagttgagtaccgatattgccgtaaccaatgattcctagagttttaccacgtacctcgtgagaaccggaggcgctcttgttccagattccctgctgtaaatcttggttacgggtttcaatatggcgtgccaagttaataatgtgtccgatggccagttccactaccgaacgggtattggaatagggagcgttgaaaacggtaactccgctcttggtggcagcatctaaatccacttggttagtgccaatgcaaaaacagcccactacttgcagacgcgggcaagaagaaatcacccgcgaagtgacgtgagttttcgagcggatccccacgatatcagcatcctggaggcgctcaatcagggcgtcctcatccaaagaacctttgatccgctctacttcgatgttgtgattggaaaaaacttcatccgccacttggtgcggatcttcaagtaatactgcctttgtcatgtttctatcttttcagcgtcaccagcagttagcaaaaccgtccgactaacggtatttcccggctcgctatcgagggttattcccatccggaagggagatcttgagaatgtaaagttactagacggcgggtggggcgggtcatggctacgaacagattgccgacgctttggacgccaatatgggctggttctagcaaaatcacgctgtcgaactccagccctttggaagtaaccgggtctaaaagacaaacccgatcgctaaccgggtcagttcccacgttggaggaaagctgggaagatagttggcagaaagtggacaaatcactttggctacaaatcaaagcaatccgtcctctaccttttccgagacaaccatcaaggtaatccacttccgccttaagagctttttctaaggtagcagcgtcaatcgccgtgaccttttgagttagcagcgagtccggatcttgcctaaccgcctgtactggatagggggaggggcgccctgcggcagcagtcaccgcttccgccaaatccattatttcctttggggtgcgataacacaccgttaaataggcttcttcctccagggcgtcaccggctggtcccagtagctggcgccacgaagaacctcccgaagaaattcgctgagctaagtcacctaccacagtaaacgagcgggaggggcagcggcgtagtaggctacgccaatccatgggggaaagctcttgggcttcatccaccaccacgtgcccgtaggtccaagtccgatcctgataggccatttccgccaaagaagattgttcagcgctggagtcagcccggctggctagcatttcagcagacacaattccccctcccagactttgtccttcgatagcagcttgggcgcgtgactgctcctgctggcgggcaagcgccctagctttgcgggaactgggggaggaggcgtcgggaagctcccccaacagttcagcaagctcatccaacaaaggcacatccgcgggggtgaaaccctcctgcttgggacgataaagaatttcttgctccgcatcgctgaactcgctggcaaagcgggaaagaaatgccggatatgcataaagacgccgcaaaagattctgggcagagtaaggcaaccaacaaagattgactgcccggcgcacattgaggttagaacgcaaatcttcacgtaccagggcacgttcagaaagcgaatcgcgatcggtatcgattttacccaggccagctgcgctagctgccgcagctagttcgacttcttgcctgcgattttccgtgtctaaatattggtcagttagggaatctaagacgtgagtaacgaaaatttcgcgtgcctggttatggggttttccactcaagcgcgcccggcggattgcttctttaactattctcggacgcagtatcagtttgctggctcccaccggaattatctggtcgtcctgcggaacccgttgtagggaacgcaccgcctgcttaatcaactttacccagcggagatcgcctttgagagcagagactgcggggtgctcttttcctgcggcgtggattcccggcaacaaggttgccatggtggtagaaactaccccggtttcccccagcgctggaagcacttgctcaatgtagcgcaagaaggctgaggaggggccgactaccaaaaccccggatttagctagacgctctgcctgttcatagagtagaaaggcagctcgatgcagggctacggcagtcttaccggtaccggggccgccttggattaccagaatctgggaggtagctgctcgaattatgcggtcttgttcgccttggatagtggcgacaatatcgcccatgtgtccagaacgtcctgcttgtaatgccgcgagcagggcgccctcgccttgtaactcaatcccttcttcacgagcatgagatagatcgaaggcttcatcttccagcgaaatcacctgccggcgatgtaacccgatatgacgccggctcgccattcccaaagggtgacgcgcggtagcttggtagaagggagtggctgcccgggcacgccaatccattaacacctgcgcgtgattatcgtcttgcaaccccactctgccgatatagaagttctcaccctggagcggtgttagccgtccgaatactaaatgttcttccacttgctcgagccgggcagcttgatctcccaggtgagcagccattacgtcacgttccgagcggttttggggagaaccggtcgctccatgcgcctgaatctggcgttggcgttggcggtagcggctacgggcagcatcgagaatctggtagatgccgtcaaccgccgcttgctcacgcgccagttctgctggatcgttcaagaagcgccccttccatgaaaaaaagtaggcatctattctagcggtttaagctgaaaagctcatagtggggcgggcggcgggtgcgtaccaaacactatccaggtaggctgggatagagatggagggtagatgaccaagcgaagccgttttattattcccggtcctgcatatgaggatacgcaggccgaagtgctgctctatgccttttcgggggccatagattctggcgatattgggggaatgattatcgaacagctcttgcacgccctcccgcatgaagaagttgcccggtttgccctagaaaccgtgctggattatcgggcgcgtcgtccgcgaatcactattgaaaactggacgatgaccgatatgcgttatcccggctgcaccctggaacgcatcaccgattattctgggcgcaacatcttgctgttgcgcggcctggaaccggacattaactgggaagatttttctctggcaatctttgaggtttgccagaaaatgggggttaagcaggcggttgacctaatgggcatagccgccaatattccccatacccggattccgtttattaaccaaacctccccgaatcccgacctattgcctccacaaactgagatgccgggtactttcatcattaccgcctcttttgggcagtatctgcaaatgctgttcaaaatgatttccgtgcaggcgcgaggaatcgtggtgggggtgccttactacttggctgatgggcaatttccgccgggagccgtcagcgctatccagtacctgtcggaaactatgaatctggatttaccgatgggagatttggaagcggccagcacccaaatgacccaggaaatcaaccaacagttagagggaaatcccgaggccaaagaactcgtggaaaaaatggagcaacattacgacgaagcgctaacccaaccctggggggagttacatcctaagtccttagcagagtcggtagattctcgctccggggatgccattgctgaacgcatcgaaaggttcttagcgcaggtaaatccacaagattcccaggaagaggtcgccgacgggctcttaggggggcgcgatgatcttttagcccatctggctcaaaaggtggcttcccgtcagttgcctgatagtgactccaaaatcccagaaacgctagcccctccggctaaagggaaaaaagaaactatttccgagggtgaaggtcgtcccatagattctgggcgaactggcgtaatcggaccacaaagcccggtcacatcgggaaaaaaggtgcaagatgacgcccctcagggcagacactttccgccgcgacgttcccgcctaaaggcgaggcaaacagaaaatgattctcagcccgctcgggcagaaatgcctgcctcaccaccgccgcctcctggtgaagaaaatccggattcccagaagcatgagccgggtgcacctgatgattttggggacagcggaaagaactgacccatgagtaaagcgccccaggctgccgccgccaaacgcgattggggcagcgacgatagcggcacaaacatcctccatgtggatatggatgctttctttgtagaggccgagattctgcgcaaccccgcgttgcgaggaaaaccggtaatcgtggggggaaaaagtaatcggggagtagtgtcttcggcctcctacgaggccagagcccacggggtacacgccgcgatgcccgtttcccaggctaaacgattgtgtccgcaagcgatagtggttgcctcgggacacggatactattcggcgctttctaaaaaagtgatggcgattctaggcgaaattaccccggttatggaacaaatctcgattgatgaggctttcttagatgtttccggtgcgcgacgccgtctgggtactcctctgcagattgcgcagttgctgcgtgcccgagtgcggggaaagctttccctgccggcctcagtaggcatagggcgcaataaactagtggcaaaaattgcctcggctcatgccaaaccagatggcatcttactggtgccggcagacagaactactgactttttacgaatcctcccggtgggagccatccccgggattggagccagtgcgggtgagaaactgcagcgcaaaggaatatcaacagtcggtcagctagctgccttagatatttctcaaatgaattctttgtttgggaaagctatgggggtgcgcttgtaccagatggcgcggggacatgattcccgcaaagtcggtgagggtagcaaggaaaaatccatcggcactgaaataactttcctccaagatgtgcattctcgggagacagtggccgctactttactggatcaatctcatcaatgcgcggctcggctacgagccaataatcttctagccggtaatgtcaccattaagctgcgagcggcagattttcgcacttggacccgctcgcgaaccttgcgtcagcccaccgatgtggctagggatatcgcccaggcagctttggggttgtttgctaaagaaaaacttccgacaggcgggattcgcctagtgggagtaactaccaaggatctgacttccgcgatatcaggcgtgcaaatggcgtgggggagcgacagtcgcgggcgggcaaccgaagttgcgatggataaaatccataaaaaatttggcgatatctccctgcgccccgctacgctagttacaccgggaaatgtagatgaggtgtccggttatgaaaccgaatctcactgaaatagagttttgttttatgctggaagcactgacgcggaaaggagtgaactaccatggggctatctgaaaaagaaaaacagattttggcagagatggaacgccagttttccgatgtccgcgtagcaaaacctccagttgaaagcagttcaagcgaggaaaagacgcaaaagctcaatctttcgccgcggctgctcgccaccatgattttactggttctggtagggatagccctactggtggtggggatttctgtttggacgatttcaaaatttttagcagtcgccgtggcagtaattggtttcgtagtggtgctcttttcggtcaccatgccgatgaactcgcgtttcgctagctttggagttaacctccacaaatccgtggacaaacgtaagccttcctctaaaggttcttcctccggtcgcagttttaaacagcgccaagcagataaatgggatcgccgtaacggcgaccgctagctgataactagattttcttcctctcgattttccgattacttttctggtttaggtttcccgcttttttccggtagtttccctgagtatttttcttcttagttcccttccgttttctgaaagccgtttttcccgggcctattctgcccgcgcccaaggaagatgtttttgacgctccctcctcagaaaatccttaacagtaattgcaaacttttactccacttatctaaaacccagtcagcgcaggttaactgggtaatttttctctagtttttcgtaaaaactccgcgatttggtactcaagtgggggaaagtggggtaaagtggagttatctggctggaaaggaggaagcgcgtatgttcttaggaacctatgaaccgaaaatggacgataaagggcgcttaattcttccggcaaaattccgggaacaactagccgctggtttagtgattacccgaggtcaagaccgttgtctctacgtttttcctgcgcgcgagttcgaggagatgtatcaagaactacgccgagctccactttcctcccgccaggggcgcgactatgttcgcgtgatgctttcgggggcatccgatgaaatccccgataaacaaggacgaatagtgatcccgccgcagctgcgcagctatgccgatctgggtaaacaattggcagttatcggcgcaggcgcacgggtagaaatttggaatgctgcgtcttggaatcagtatctggctgaacaagaggaagccttctcccaaaccggagaggaagtgattcctggaatgttctgacttggagagcctggtcttttcccgaatgctctgaggcctcttccccggtagcagatcttcggggaaagccctggttttccaaaaatcttcactgacaaatcccgaatctccctaaggaaaaacatgtcccaaagcgctactttaacccaccagccggtgctggctgagcgctgtatcgcgctcttaggagaggggattaagcaggtaggatcagagggacgcgccctagtcattgatgccactttggggctggggggacatagcgaacttattttacagacctatccccaggtgcatctggtaggcattgaccgagataaacaggcgttagcgaatgctacaagacgcctgcgggactattctgcgcgcttcacggcagtacatgccacctatgacgctattgatcaagtcgccgccgcctacagtagtgaggaatatccactggctggagtgctaatggatttaggggtttcctctatgcagctcgacgatactgctcgcggttttagttatgcccgcgaggccgacctggatatgcgcatggatcaaagtagcgggaaaacggccgctgacttattagctgagctgccaactgccgagttgaccgagattttgcgtcaatggggagaagaacgctttgcttcccggatagcccgagaaatagtacgtgcgcgggaaaaaagtccaatcacctcctctacccaattggtagatatcgtgcgggaagctattccggctcctgcccgacgcagcgggggaaatcccgcaaaacgcacattccaagccctgcggatagcggttaaccaggaactcagtatcctcagtgacgccctgccgaaagcgctacaagcgctagctccggggggagtcctggtggttgaggcttaccaatctctagaggatcggatagttaaacgcgcctttcagcaggcagtagcaccggcaatcctagaggggattccgctagctgaaccaaaaactttccaattgttgattaatggagcagaaaaagccccagaagctgaagtagaaaataatcctcgctccgcatcggtgcggctgcgagcaatccgcaaattaagtgcgcaagcagaaaggaacggggaataaaatggccaattccgccgccctacgacaagtatcgccacctagcagaagaccagttcgcaccccgaaggttcgacacttgcgagtagtgggggaaaaccaaacgcttaagaagcattccccgctagtggtgaaaatctttgctgctgctttaaccctggttgccctgattatttccccgttgttgattaacacgcagttggcagttatttcttaccaaattcacgatgatcaggtgcaactagcgcaattgcaagaagataaccaaaagttgcattctcaggttgactcgcaatcaagtccagaaaaagtacgggaagctgctttagctgatggctatgtcccagccggggaaactggatacgttactctaaagacaggaaagattgagggaggagctcctccaacagagcaacctaaggaataataggtagtgatggttcagaagaagcggaactacccgcgcggcgagagcgcttcttcgcgggggaagacagtaaaaagtcgtggcaaatcgactggacttgctgcgagtagttcatctaaacatcaatcttccaaagaacaattaaccgcggaagtagccaaaaagcggggaagattgctgttggtgctggtgggggtaatttctctgatttgtgccggtcggttatttgatttacaggtagttcaagggccgtctctggctgatgcggctacccaggctcgtacctcttctgccacgattgtggcgaagcggggtgacatagttgaccgtaagggaacggtcttagccacttcgattgaggtgtacaacattgctgtaaatcagctattagtaaaggactatatccaccgagaggtgttcgatagctctggcaagattgttactgataaagccaaactgcgtgaccccagaaatcatgaaaaaatagtaggaactggagcggcggaagcggctcgtcaactcgcgcccatcttgaaaatgaatcccgcagagctgggcggaaaaatggtagggaaacgcggattcgtttatcttgccaagaatgttagtgcgcaagactggagaaaaattcggaagttagggatagatgggattgatgcggagcgtcgttaccaacgcgaatatcctaacggagcgaccgcttcctcgattttagggtttaccgattacgagggagtcggtcaggctggtgtcgaggctacccaaaataaactcttagaaggaatccccggtaaacgctccacggagatatccccctcgggtcagattattccgggcggaaccgatattttagaggccgcaaaaccaggtaaaaccctgaggttaactatcgatgctgatctacaaaacagtgccgaaaatatcctgaacaaacaggtttctgattttggtgctgcctggggtgcggctattgtgcaaagggtcggtagtggccagatcctggcgctagctgattctgggaatgagcccccagaagaagtgcgaaaacgaacctccggcaccaccggatcacgggcaatacaatatacctacgagccgggttctagcggaaagctggttacttttgctaccgctttggagcaaaagaaaataactcctttaaccccggtgagtgccccctacgaaatcactctcgccgggcagtcattccgggattctcattctcaccccactttggcgctaaccgcttctggggtgttggcagaatcttctaacaccggcaccgtgcaaattgggcaaatggttactgacaagcagcgttatcagatgatgaccggattggggatgggacaaaaaactggtatcgaaatgcccggagagtccgcaggattaatcggcagtccggacaaatgggatggtcgccagcggatgaccaccatgtttgggcagggaatggcctgcactccgattcagatttcttcgctaatctccactattgctaaccatggggtgcggctgaaacctcatctggtcgagggatacgaagatttgcagggggtattgcataaagctaagcaaccggcagccgcgcaaaaagtagaccaaaataccgcggctaccctggtacgaatgatggaatcggttactactgatgaaggaacagcccgcaaggcgcaggtttctggttatcgaacggccgggaaaactggaaccagtgagattttatcggggtcgggtgcctccgagggggtggtggcatcatttgtgggactagcgccggccgaaaatcccgagatagcggtatcgattattatctataagcccacaaccgggacttatggtggggtagtggctggtccggtattctcccaggttactgcgcaagcactgacgttattagatgttcctccctctgctactaagcctaagctttatccgatcgaagctcactaggtattcttagaacagacgtcttttaggagtgaaaatatgtggacactgggctggattgccgacgcccttaaccggtcttgtaaagacccagatattgaggttaccggacgggtagtcaccgattctcgcgaggttaaaccaggggatttgtatgtggcgcgtcgcggtgaaaactccgacggtcacagtttcctagctgctgcaaaaaacgcgggagcagcggccgcactcgttgaacgcccggaagaagccgaaaaagcgggaattccctatgtgcaagttctggaagctactcgggcattaggatggttggcacacgcgcacttagcggatttacgagctaaaggagccgggaaaaaacctgtctgtgtagggattaccggatctgcgggtaaaactaccactaaagatttgttgtcttccttattacagttgcgcggagaggtagtggctcctgaaaagtcctacaacaacgaggtgggggtgcccttaaccattctgcgcgcggatgaaactactgactttctggtgctagagatgggagcttccggacccggacacttgtcgctacttaccgaaattgcccctctggatatggcgattgagctaatggtagggcacgcccacctgggcggattcggaagtatagaggggctggcgcaggccaaagcggaactgctttgggggctgcgaaacttcccgggaaagcgttattggccgctaagtgatcccgctttgcaagcaaaagaagttttccagcaagacggttatagcgatgcttttccagttgtttccgctgcgacctcactagctatcctgaatcttgacgatggaagagtgagtcaaatggcttccggccagggaatacgttattttggggagttggaaactgctgatagcaaaaaaactggtcagaattcccctggcgtctatgcctcccaggtaaagatagacggtcagggccgagcagaatttttgatgactcgcgggcaagaaactatcgaagtgaggttagggctagtaggccgacataatgtcaataatgccttggcggcagttactgctgctaccgagttgggggtttccctgcccgaggccgcccgcgtcctcgaaaatgctcatccgttatcgcagcaccgcctggacgtgcaggaagtcgaatctgatattaccgtgatcgacgattcctataacgcgaacttggattcgatgcgttcggggataaaaaccctgcaaactttagctaaagctaaggggcgaggacgggcaatagcagtactaggggagatgctggaactgggggcagattccagcaaccatcaccgcctggttggccaggcttgtgtgcaggcagatttagacctagttatcactgtgggcaaagaggcagagccgatttatcagacagtttccgaccacgccgaggctcaacactgcgaaaatgccgaacaggcgcttaaagtgattaggcaggttctaactcccggcgatacggtattgattaaaggatctaacggatctggggtctggaaaattgcagacgccctgacaggaggtggcgagggctaatggtgcctttgggaatagcgcttttaacctctctagttgtctcattaggggggacgccggtgctgatacggctcctccgtaagcatcaatatgggcagttcatccggaaagatggccctaccgcacattacaccaagcggggcacccccactatgggcgggatagtaatcatcttggctacggtttgtggttggattgccgcgcatattgcttcttggaccttcccctcggcctcgggatggctgctaatgctattgattttggggctgggactaatcgggttcctcgatgactatattaaaatctctcggcaacgatctttaggtttgaccggatgggctaaaatagtaggccagttggcgataggcaccactttcggggtattagctctactgtttccgcgccgggaggaaaccgggattgcgattactcccgcctctaccaaaatttcggtggtgcgcgacgtatccggcctggatcttgcttttgcgggcacagtagtggctattatcctgttcgcaatctgggcaaactttctgattgcggcctggtcaaacggagtaaatcttatcgacggtcttgatggcctttcctccggatcttgcctatttgcctttggtgcctataccggggtggctacctggcagtattatcagcgctgcccgcttcgggaagttgctcctcaggtggcggatgcttgctacgaggtacgtgacccggcagatttagccattatttccttggcaatagtgggtgcctgttttggcttcttgtggtggaatacttctcctgcccagattttcatgggggacactggttccctagctttaggcggggcttttgcggggctttccattctgactcgcaccgagtttctggcagtcatcatcggcgggctgttcgttatgatcgtgatgtcggacgttatccaagtaggggtatttaaactgactggtaaaagggtgtttaagatggcgcccttgcatcaccatttcgagttaaagggatggaaagaagtaaccatcgtagttaggttctggattatagctggcctgtttgcgattgcgggggtggctctgttctatgccgaatgggtggttgcaaccaggtgacaaaccaaaagtgggcagaccgccgagtttgcattatcggtttaggttcttcaggtagcgcttgcgctgaagtgctagccactttgggggcgaaagtatccggaattgatagccaggaagaggcggtagagcgctgctgccaggaatacccacaaggccggttcttccagggggatcaggatagctgtggagccctcctcgacaagattgagccttcgctaatagttgttagtcccggggttcctcctcgtcaccgcgcgttttcctgggcggtagaacaccaggtagagctgtggggtgaggtggagttagcctggcagattcaaaaaactgcaacttcacgtcccgataccccttggctgaccattaccggtactaatggcaaaaccaccaccgtggggatgacgcgttcaattttgcaggctgcaggctaccaggcgctcgcggtcgggaatgttggttctccggtggtgttggcggcggctaatgccaaagcccaggtgctagcggtggagttatctagcttccaactgcacaccattaggacgctatcgccactggcggcagtatgtttgaatctcgatgctgatcaccttgattggcatggtagtcagcaggcctacgcggcggcgaaagcgcgggtttatgaacgtgcccagaaagccgccctctataaccagcaagatccccagactttaaagatggtgttggacgctgacgtaaccgagggctgccgggcaatcggttttactaccggtactcccgatatttaccaactgggtatcgtagaggatatactggtagatcgggcttatagcgccaatccctataaagaggcagtagcgttagtgggcaggggagatttccgctactaccaggcggaaccggggattaccgtcctccaagatgcactggcagctgctggtctcacccgggcattcggggtagaagccgaagcagtacgcgatgggatacgcgagtttgttccccaggcgcatcgccgggtaacggttggtcgggcagctgacgttacctggatagatgactcgaaagctaccaatactcatgcagcggcggcttcccttgcaggttcctccccgaattcagtggtctggattgccggcggggacgccaagggacagtcctttgaccagctggttcaagaagtagtctcctgtttgcggggggtagttctgattggcaaagatcgctccgcactgcgccaggccttagccaagcacgcacctaaggtgccggtggtggaagtcagcaaccccgatgacatgatgttttccgtggtaaacgaggcggtggcgctgtctcgtcccggggatcaagtaatcctggctcccgcttgcgcatcctgggatcagttcgagaactattcccagcgaggggaagcttttgctgaggccgtgtcccgtttggagggctaagatggccaaaggtaaaccggtgaagaacaaacagaaagctcgtagcggggttaccgggaaagtaaaagcaaaacttccccgcatcaaagtggaacgtgctcccagttttcgttcggataatcccgaggataaacgccgcatattgaacttgtggcgttctataacccgcaatccggtcttcgactaccagatgctgtggttcctggttatcgcgctgtcgctaatcggattactaatgcagttttcggcctcggtgatcctggaactttcagccggaattaacccttactggggaatcattcgccctctggtcattatgggcttgggattcgcggcgatgattttcatttcgcgtctacccgccggccggctagaaaactatacccttattttaatctttcccctggcggtagcgggacagttagctgttttcaccggcctaggtagatcccaaggcggtaaccgcaactgggtatatgttcccggcattaaccaagtattccaaccctcggagttcttaaaagttgcttttattctgcttttaataacggtgtttgttagtggcagatgccaaatagattcgcttagttccctttcaaaatgggtgggaataccgttcctgatcatcgtagccacggtaatgggtggtcacgacatgggaaccttgttgatctttgtttctattctgctgtgtgtactgctggtagtggggatttccatgcgttggttcagcatgggaattgctttgctcgccttgggtgcagtcggcgcagtattggcttcttcttcgcggcggcgccgggtactttccttcttaaaaccctcacaggcagaccctatgggatcggggttgcagccactgcgcgccaaatggggtctaggaaccggaggactgaccggggtaggaccgggggcttctcggcaaaaatggaactacttgcccgaagcgcacactgactttatctatgccatcttgggagaagagttcgggctggtgggaacgctgctagtgctattactcttcgggttgctggcttgggtactttgccggctaataattcattccgcgaatcccgctacccggatatgcgcggggggaactttgggttggataatcgcccaagccctaataaacatcctagtagtgattggattcttgccagtagtaggggtacctttaccgctggtttcttcggggggatccactgccttagcaaccctgatacaaatgggagtgctcttaagctacgtgcgtgcagagccgggggtagccgaggcggcggcgcgcagaccaaaatatctacgtgccactagagccgtgagattggggaaacgcaatgcaaaataagaaatcggtactcttagccggagggggaaccgccggtcacgtcaatccgctactcgcagccgcacgctgcctgcgagataaagactggcaggtaacgattgttggcaccagagaaggtaaagaagccgagctagtgccagcagccggctttgagctgaacaccatcccacgaatcccgttgccacgtcgtccctccctgcagttttttactatccccactcggatgcgcgcgaccgtacaaaaaatcgaatccctaatccgggagaaaaaggtgagcgtagtggttgggtttggaggctacgtatcaacccccgcctatttcgctgcccggcgcgcgcaagtcccgctggttattcacgaacaaaatgcccgccccggcttggctaaccgtttgggggcgcgctgggcaaaagttgtttctctaacttttccctccacgaagctgcaggctaagcgagggaaaacagtttgtattggtttgcctctgcgaccggaaatagcggcgctggccaagaaacgccaagagctccaggaacaaaaacgtgagcgtcaggtggcgctagaatcttttgatcttgatcctcagttaccaactttgctggtaactgggggatctttgggggcgctttccctgaatcaagcaatgcaggaggcgctggaacagctgccggaaaatatccaggtaattcacttaaccggtaaaggtaaagatgatacggtgcggcgcgccctgcccgaatccctaaaagctcgttaccgaatcttggattatttagtagatatggagcgagctctagctgctagcgacctggtggtttgtcgttccggagcgggaacggttgcggagatgaccgcgttagggctgcccgctatttacgttccgcttccgattggaaacggtgagcaacgccttaacgccgtggatgcggtgagaagcgggggagcgctgttggtagataactccaagtttgacgccgctttcgtaacagaaaaggttattcccttgcttttggcgcctgaacgccgtgcccaaatggcagctgctctgccagaagaagggatagatgccgctggaaaactggcgaaaatcgctgaggaagtaagcaaatgagcgaaaaaagatatcattttattggggtaggtggagccggaatgtcggtggtagcgcagctatttttcgcgcgcggctgggaactgaccggctcagatcaaaacgattccgctaatttaaataaactgcggaaaatggggattaactgttgggtgggtaccagaccacagctgattaccgcggacatgattattgtttattccagcgcgattcacccggacaatccggaatttgcggccgctaaagccgccggctgtaagttcatgcatcgctcccaggcactggcgctggcggctgcggaccgcaagtttgtggcggtcgcgggtgcccatggcaaaaccaccacctcgggaatgttggcgcaaactttttcgcaactaggagccgacccttccttcgcagtcggcggggtagtccgccactatcaaactggtgctcatctgggtaaaggtgactattttattgccgaagccgatgaatcagatgcctctttccttaactatcgcccgcagctagcaataattactaatatcgagcctgatcatctggataactatggttcccccgaaaaatttgagcaggcattttttgactttgcaaattgcataaaacctggtggaaccctaattgtgtgtaccgatgatcccggttgctgccacttagtggagcggctacgcaccccgggggcggcgacagcagacaagcaaaatagcatccagatactggggtatggaatcgaaaatcctcccgccaatcttgatcagttttgcttggttaaaccgcagggagaagaccccggttccgtgtctgcagattttatagtcggtgaagaaaataccgcggtgcgcctaccgatgccgggacgccacaacttattaaacgcggcagctgtgttcctagctgcgcaggtagcaggtttttccgctaccgacactgctcaggccttaggggagttttcgggaacctctcgtcgctttgagaccagaggagaaatcgaacaaatccgggtgattgatgactacgcccaccaccccaccgaggtagaagcactcatgcgccaggcaagagaagctgccgccggagggaaagtgttggcgctgttccagccacatttattctcgcgcacccgcaactttgcttcccgttttgcctccgccctcgatttagcggaccaggtaatagtttgtgacatttacggggcgcgcgaagaccccattcccggggtcacctcccaaatcattaccgaaaaaatgcagcgtggctcctacctgggaaatcgagatgaagctgcccgtgtcctcgccaaagctgcacagccaggggatttaatcctaaccgtgggagccggggacgtaaccgcggcgggagcagttattctgcaggctttagagcaaaggttcgcccagtgaacactcgtaaatcttccttttcgcgccgctcaaaagctaccgaagtgtcgaaagatactcgtgcgggtaaaaaccgcaggaagacgggtcataaaagcgaaaaggcagtttcgaagcctcgggtaaggcaggtaactttagcctccaaggatcgggcagtagtttctagtggtcttgcccagcgacgccaggaaatagcccaggttaaacggcgacagcagctgcggcggaccgttataggtgtccttatcgtagtggtagtggcggcattgggatacctgttctggttttcccctgtttttgcctttgaccctacgcaaactcgggtaatgggagctagcgcgcaagcgcctgctaaagcggttaaagaagaagtatccgcctatgccgggaaacctttgctacgtttgcctacccgccaggtagcttcttcgctacaaaaagaaaatccctggatcaaagatatccaggtaaaacgggagttcccgcgaggattagccgtttatctgaccttgcgtaaaccggtagccaaaactgcgcaaggggctgtggtcgaccagcaagggaagatcgtaccggcgaacggatttgatgccgcaaatctggcagaagtgagtactagctgtccgcaggcgcggactaccgattgcttaaagtcggttgcccaggtgctggtgtccctaccaccagaaattaaagaaaaggtggctactgcccaggctgcgcggttagataacgtagagctgcagcttaaatcgggagccaaagtgatttggggtgccagcagcgataaccagaaaaaagcgcaggtactgacggtacttttgcagcgtgaaggtagtgtctataacgtcaccgattacgctcaccccacgattaccggttaggacgaggccggggtagagctttaaagcccagctagcagaggaaaacaagactttaaaggcagatttcacctgggcgccctgaaaatagagtagcggactatttggggtaggctttgaaggagtaatgaagggagaaaatagtccatgagcaacagcgccagcgacataccggcatatcggtacaccgccaagatggcaggagaaatcgaagaaaaatggcaaaaatactggtcagagcagggtacttttaatgccgataacccggtgggttctctagctggtcctctggcaaagaaagagtctttcttcgtgatggatatgttcccctatccatcgggcaaaggtctgcacgtaggacaccccctcggctatatttccaccgatgtcactgggcgtttccagcggatgcaaggcaagaatgtcctctacaccatggggtacgacgcttttggtttgccagcggaacagtacgcggtaaccactgggcaacatccgcgtaagactacccgggaaaatatcgccactatgcatcgccagttagcgcgtattggtctttctcacgatcagcgacgttcgttcgccactatcgatcaggattattaccgctggacacagtggattttcttgcagattttcaactcttggtatgacccggaggctacgcgcccagacggaggacggggagcagctcgtcctattaacgagctaattgaaaagtttgccagcggggaaaaagctctgcccgaggatgcgaagtggagtgaactaacaccgaagcagcgtgaggacatcctcgaagactatcgcttagcctatttgtcttatgccccggttaactggtgtccaggattgggtacggtgttagcggatgaggaagtaacctccgaaggacgctccgaacggggaaactttccggtattccgctctcacttgcgtcaatggatgatgcggattaccgcctatggtgaccgcctaatccaggatctagccactttggattggccggaaaaagttcgcactatgcaggaaaactggattggacgctcccacggcgccacggtctctttccaaaccgagggagacagcctgcaggtttacactacccgccccgataccctttttggcgccacctttatggtggtggcgccggaacacccgctgctttctgcactgggacaaagcgaacttcctcagggcgccgcccagattcctgcgcagtggccgaccggtacccggcaggcctggaccgggggttatgaaaatccccagcaggcagtgcgcgcttaccaaaagcaagcggcagcccgcagcgagcttgaacgcggggaagatgcccgcgaaaagaccggggtatttacgggtttatttgctaccaacccggttaataatcgcccgattcctattttcaccgctgactacgtgatgatgggctacggtactggcgcgattatggcggttcccgcccatgaccagcgtgactgggatttcgccaagaaatttgatctggacattatctacaccattactcccgagccggatgcagatgaagacgctgcttggattggggacggggttattcagaactcggctaatgaccagatttcccttaacgggctaggtaaagccgaggctattaagaagataactgcctggctagaagctgcgggactgggagaggctaccactacttaccggctacgcgattggttattctcacgccagcgctactggggagaaccgttcccggtggtctatgacgaggagggagtagtacacgccctccccgaatcaatgctgcccctggatctgccggaagtagataatttctcgccgcgcacttttgcccccgatgatgctgactcttcacccgaggcgccactagggcgcgccgaagattggataaaagttgagctagatctgggagagggcaaacaaacctattaccgggacaccaatgtgatgcctaactgggcggggtcttgctgctatgagctgcgctacctcgacccgcaggaaaagaatttcctggctaacccggaaaatgaacgctactggatggggccgcgcgagggcgcgtcctcgggaggtaccgatctatatgtaggtggggtagaacacgcggttttgcacttgctctatgcacgtttctggcacaaagttctctatgacctggggcatttatccagtcttgagccgttccacaagctgtttaaccaaggctatatccaggcctacgcctatacggataagcggggagcctatgttccggcctccgaagtagcaggcgatgaggccagcggatttagctatcagggagagccagtcaagcgtgaatacggcaagatgggtaaatctttgaagaatattgtcactcctgacgatatttgtgccgaatacggggcggacactttccgggtttacgaaatgtcgatgggacccctggatatgtcgcggccttgggaaactcgggcagtggtcggttctcagcgcttcttgcagcgcctgtggcgcaacgtggttgatgaaaatactggtgaagttattgttagcggggacgctcccgatttggaaactcaacgcgcgctagcaaaggcgattgcggcggtaaccgaggattaccgggaaatgcgcctgaacctggtagtttcgcatctgattgtgctgaataaccatttgacttcgctaaaagcggttccccgcgaagtagcggaggcgctggtgctaatgatttcgccgctcgctcctcatattgccgaggagctttggaacagactcgggcactcctcgtcacttgcgcgcgaacctttcccgatagtaaccgatgaatctttactggtagaagagaaaatcactgcggtggtacagattaacgggaaagtgaaatatcggctgcaagtcccgcagtcaatttctgcggaggatctggaaaagcaagcattagcgaccgaggttgtacaacgcaatcttgacggcggcgagcctttgaaagtgatcgttcgggaacccaaattggtgaacgtagtaatcagaaagaagaagtaatccctactgaaaactaatgggagcgagctcttctcctttccaatagttttagtgctttacctttgagatatttttaaggagcaaacttgagccaagaaatctggacgctcaaagcgggaaacgattcggtatcgatcgctaaaatcggggcaacggttttagattggcaggttgaagatctgtttgaggagcccgctgaggatcccacgcctttagatgaacctcgggagttagaaaagcgtaccgtccgcgtcatcgacggctatcgtgacccggcagaggcgcgagagctggatgggtttcgcagcgcggtgttggcgccttggtcgaatcgtattcggggcggcaaatacactttccaaggacaagaatacgattttcagggcaaaaccattggggggccactggctttgcatggtctagtgacagatcagccttttgaactgattgagtctggtgaagatttcctgcgggcaaaagtgcaggtaccaaagctagacgcctatcctttcgaggtggaagtagaaattacttaccgtctaagcagtgacccacaccggctgtcactagatctggtggccaggaataacggcgagggtgatgcccccattactttaggttggcatccttatctggtgtgccaagggggcaacgtagaaaatactagagttaccgtgcctgcccagattcgcgtgcaaaccgataaggatctgattcctctgccgggaataaatggattctcctcgcagacatacccggttactttggtgaaccgcaacgacattgattggggtttgacttccctggttgaggatgaaggcgttgctactgcggtagttgatcatgcggacggctcccagactgcggtatccataattggtgctcggcaaggcttaggtttagcgacacttcatgtctacaccggtcaagatttggcctatcgccggggattgtcggtagcggtcgaacctctactggcgatgacggatgcttttaatcgttccgagtgtgaagatctgattacggtacctgccggtggaatccaagaattgcatgccgcgctagaacaccgtagtccccgacagctggcttagtttgagtaggggactggatagctgacttagttgtcagctatcctggtactttttgaagcccgccgcaaccgcctgtaaacacgcggttgcggcggttttatctattagaaaacctgagtttacgcaggtgaatacgctattttttaaaagtttatgtggcttcgcttacttttagtgaatctggtttgacgctgggcactaaggacggtaactttgtattcgttgccgagcgcagaggccggcgggagaaaaactttcccgccgcttattttttgctcgcgacgaatcctgaccggccagttttggttggtttgtggtttggttgtttgtgttctcgatagtgtgtttttttgttttgtttgtgtgggattgaactggggtgcctggcgttttgttgggtgttttggttttttcttgtttttgtttttttgatgctgatgattttggaacgttttgttttttgattgttggtgtttgtttttgctggattgttttctggcttgaatcatttttttggtttttgttggagagtttgatcctggctcaggatgaacgctggcggcgtgcttaacacatgcaagtcgaacgggatccaggggtgcttgcatccttggtgagagtggcgaacgggtgagtaacacgtgagtaacctgtccttttctttgggataagcattcgaaagggtgtttaataccttatgttctgtctgcctcgcatggggtgggtgggaaaggctttggctggatttgggtgggctcgcggtctatcagcttgttggtggggtgatggcttaccaaggctttgacgggtagccggcctgagagggtggtcggtcacattgggactgagatacggcccagactcctgcgggaggcagcagtgggggatattgcacaatgggcgaaagcctgatgcagcgacgccgcgtgggggatgaaggccttcgggttgtaaacttcttttgctctgaacaaggcatgcctgtggggtgtgttgagtgtaggggttgattagcgccggctaactacgtgccagcagccgcggtaatacgtagggcgcgagcgttgtccggaattattgggcgtaaagggcttgtaggtggctggttgcgtctgtcgtgaaagctcatggcttaactgtgggtttgcggtgggtacgggctggcttgagtgcagtaggggaggctggaattcctggtgtagcggtggaatgcgcagatatcaggaggaataccggtggcgaaggcgggtctctgggctgttactgacgctgaggagcgaaagcgtggggagcgaacaggattagataccctggtagtccatgctgtaaacgttgggaactgggtgtggggggcttttttgtcttctgcgtcgtagctaacgcgttaagttccccgcctggggagtacggtcgcaaggctaaaactcaaaggaattgacgggggcccgcacaagcggcggagcatgcggattaattcgatgcaacgcgaagaaccttaccaaggcttgacatgcactggaccggcccagagatgggttttcctttttggctggtgtgcaggtggtgcatggttgtcgtcagctcgtgtcgtgagatgttgggttaagtcccgcaacgagcgcaacccttgtcctatgttgccagcaagttgtgttggggactcgtgggagactgccggggttaactcggaggaaggtggggatgacgtcaaatcatcatgccccttatgtcttgggcttcacgcatgctacattggcgtctacaaagggttgcgataccgtaaggtggtgcgaatctcttaaagggcgtcttggttcggatcggggtctgcaactcggccccgtgaaggtggagtcgctagtaatcgcagatcagcaacgctgcggtgaatacgttctcgggccttgtacacaccgcccgtcacgtcacgaaagttggtaacactcgaagcttgtggcctatccgttttacggggggagcgggtgaaggtggggctagcgattgggacgaagtcgtaacaaggtagccgtaccggaaggtgcggctggatcacctcctttctagggagaaattatttatttagcgcaaataaaacgaggaaacactttcctcccttctttttggggggctatcgggtataggaacaatcaggccttaagggtttgtttgtttggctcattcacttttgaaagtttgttgcttttggggttttttgggttggttgtttgttttttggagagtggatgtgagtgtctttgtgatgcttttattgtgagaatcttgttcgttgaccacctttgggtggttggtgttttttttgtttattggtttgttttttgtttttgagcgtttggtggatgccttggcatcgtgtgccgatgaaggacgttgtggctggcgatagcctcggggagttagcgagcgagcgttgatccgggggtttccgaatggggtaacctaaccatagttgtgtgtggttggcgcgcactgaagtttttgtaggtgtgtgttggtagggtgggaagtgaaacatcttagtaccgccttttgtgagatagtccgtgtgtagtggtgagcgatagcgggtgttggctaaaccgtttgcgtgtgatactcggcaggggttgcgcaggcggtgttgtgggactgaatcgtcaagcaactgccgttgtttggaacgtttttgtgtgtgtgaggtgaataggttgggatgccttaccggagaccgtgagagtcgggtagctggttacatatgcagtgcgttgggttttgttcccgagtagcgcggggctcgtggaatctcgtgtgaatctgcccagaccattgggtaagcctggacgggcgcggtgaccgatagtggattagtaccgtgagggaatggtgaaaagtaccccgggaggggagtgaaatagttcctgaaaccaagcgtttttaagccgtcagagccgcggggccttcgggttggtgtggtggtggcgtgcctattgaagaatgagcctgcgagttatgttgcgtggcgaggttaacccgttgtggggtagtcgtagggaaaccgagtcctgggggcgttttagttgcgtggtatagacccgaagcggggtgatctacccatggccaggatgaagcggcggtagaacgtcgtggaggtccgcacccaccagggttgaaaacctgggggatgagttgtgggtaggggtgaaaggccaatcaaactccgtgatagctggttctccccgaaatatatttaggtatagcgttccattttttgcttgcgtgtggtagagctactggttggttgatgggccttgttggttactgagatctgctaaactccgaatgcgcgttaagttggtggggcagtcagacagcgggggataagcttcgttgtcgagagggaaacagccctgatcatcggttaaggtccctaagtgtgtgctaagtgggaaaggatgtgtagttgcgttgacagccaggaggttggcttagaagcagccacccttgaaagagtgcgtaatagcttactggtcgagtgattgtgcgccgataatgtagtggggcttaagcatgccaccgaaactgtgactacagcattttttgtgttgtggggtaggggagcgtcctgcattgttgtagcggcctggtgatgggtcgtgtgtggtgtgggagtgagaatgcaggcatgagtagcgagtccagcgtgagaatcgctggcgccgataaactaagggttccaggggaaggtttatccgccctgggttagtcgggtcctaaggcgaggccgtcaggcgtagtcgatggttgagcagttgatattctgctaccgggatgggaccgtttttagcgctttttcttttaagcttgacgccctatttaggtgtttggcttccttcgggttgctgagtgtctttggggttttgggtttttggtttgagtgttttagcttcgtggtgacacagtgagattgcctggcgcggtgatggtttaccgtgttcaagcctgcagcctgtcttctaggtcaaatccggaagacgtaagggtcagaggtgatggtggggcctgtttgggccgataacagggttggtctgtgctgtctagaaaagctgcgttgtgaggtgttattccgcccgtaccctaaaccgactctggtagttgggtagagaatactaaggcgagcgagtgaatcgtggttaaggaactcggcaaattgcctccgtaacttcgggagaaggaggccccaccccttgaaaccgctttgcgtggttagggggtgtggggtgcaatagcaagatggaagcgactgtttatcaaaaacataggtgcgtgcgaagccgtaaggcgaggtatacgcactgacgcctgcccggtgccggaaggttaagaggaactgttagcatttttgcgaagcggtgaatttaagccccggtaaacggcggtggtaactataaccatcctaaggtagcgaaattccttgtcgggtaagttccgacctgcacgaatggcgtaacgacttctgtgctgtcttgaccgcgaactcggcgaaattgcattacgagtaaagatgctcgttacgcgcagcaggacggaaagaccccgggacctttactatagcttggtattggtagctggttgtgtttgtgtaggataggtgggagacaaagaagcaggaacgctagtttttgtggagtcggcaagtgaaataccactctgatgttgctggttatctgaacctgggcccattatctgggttagggacagtgcctggtgggtagtttaactggggcggttgcctcctaaatggtaacggaggcgctcaaaggtttcctcatcctggttggtaatcagggtttgagtgtaagtgcacaaggaagcttgactgtgacactgacgggtggagcaggtacgaaagtaggaactagtgatccggcaatggcttatggaagcgttgtcgctcaacggataaaaggtaccccggggataacaggctgatcttgcccaagagtccatatcgacggcatggtttggcacctcgatgtcggctcgtcgcatcctggggctggagttggtcccaagggttgggctgttcgcccattaaagcggtacgcgagctgggttcagaacgtcgtgagacagttcggtccctatccgctgcgcgcgttaagacttgagaaagtcctgtccctagtacgagaggaccgggatggacgaacctctggtgtgccagttgtaccgccaggtgcatggctggttggctatgttcggaaaggataaccgctgaaagcatctaagcgggaagcctgctttaagataaggtcttttaggttcccagtagactactgggttgataggccagaagtgtacacgttgtaaaacgcaaagctgactggtactaaagaaccattaaaaaacaaacacaaaaaacacgctagtgttcaagcatccacacaaaaatgtcgtcacgaagacgctcacacccactctcctagaaccgtcatacaagaacggtgcccccaaaagtagtaaccagattcaatggttaccagtgataaaaatagcgggggttgaacacatagtcttgtggtggtcatagcgcctaggacacgcccagtcccatcccgaacctggaagctaagctaggcagcgctaatggtactacgccccaacgagcgcgggagagtaagacaccaccacaaccaatttaataaggcagggtacagaaactgagatcagtttttgtaccctgcttttttataattttagttaacaccaacgaggttgatctggaaatgagctttatcagggaaactaacctttaaaaggctactccttggcccatacagtacagaggtcctcaaaacggggcaggaaatgttctatctgccagttgcgcgcttctgctgtttctagcagggtttgcagatctttaccaggttcccaatacgcggctacctgccgggtagcactaggagaaagcgcaaactctgcccaaacctgattttcctgcgcccaggtagaaacgttctgtttaagtgttcggtaaagttcagcccgagctggatctatcttttcccaggttgccacggatgctatttcatgcaaccgtcgcagcggtgctttgcctggcaattgcttactgggtaagccccgtactttctttattgcctgccaccagcgtcggcagtggcgacgcagctgcggacgagacgcaaaaggacgcttagatagctcctggtaggagtggggtgttttcaacaccaaatctattaaatcccgattaggtagcacccggctgggggctaaatcgcgttcctttgcaatctggtcacgctgataataaagttcacgcaacaaacctagttgctgaggggacttcgcttttccggcacctttcaaatgtcgccagggttcggggtcgctttggcgacgatagtgagttaaagtataggcaaattcttgctccgcccacggcagacgccccgctgctactagctgttttttgagcgcgactgccaactccaccaggtattccacatcgagggcagcgtaatcgagccaagattgtttgaggggacgccgggaccagttctctcgtgtatggttctttgccagcttcacgccgagcacatcttcagtgagtggccccagtcccacttgggttttccccagtagcttggctgcgatttgagtatcaaataagtggggagcctgcagccctgcccactccatacactctaaatcttcttttgcggcgtgcagcacccaggtgctatttttgcaggcggcgctaaaatcagacagctcaggtaaagctaacggatcgagtaaactcaggggcgcactctggcctttggcctgaatcaaataggctttgtcctgatagcgaataccgctggcgcgttcggtgtcaaaagctacgtattctccgggacttcgatattcacgcagacactcctggtatttctgctcgctatcagtgaggggaaccgagccctgacgaggacggtaaagggtttcactcataccagtttgacctgtcccagacgggatattccggcgctaacctccactgaatatcccgacatcatcgctaagaggcgagagattgcccccgcgtggggcgccaaatcgttttctaggggtgtccaggaggcgcgcagctccatttctgcagattcagagcgtttttctaactcgccaaagctcgccgaatgggagcgagtaaccgatccggcagcctggaaaaaactagcatctgattgagttaaaaaatcggtgagccaagaccaacaaacctggtcagctagcggttcggtaactaaatctacatctacatgtgcgcctagcatcgtcactaggcgaaaacgcccctgccagccaggttgttcctggggatcgtaaagaatcactagccgccccgaccctccactattggagttatcctccaaggcgccacagtccatgcgaatcgctgcagaaaaaggagcgattccgcggggagccggaatctcgctgacttccacgtgcgaatcataggcggcatcacgcaaggtgagcagagcatcggtaaactctgtaggcgtcttttgattcactatttcagcgtaagcaggaaacctttcctaaagccgctgccacgccgataatcagccgctatagtaaaaagtaatgtgtaagacctttgtatataaggctctactatccttgtatgtcggcgaccctaacaggagtgatatggacaaagatatttccgatattgaaatatgcgtggctaacaaacacgcgaaaaactcctggagatctgaggtttattatttgcttagcaacgcagataaggaatttctccctccgttgtcagcccgtaactcgacttcgcaaaaggaattaaaaactaggaaattcctagaagacggagttgaaaactattttcaagaaatgtgggctcaagaatttctactagctactgtcggtgctaaggaaaaacaattagccggctttatgtcttataaaaacggatacgaagtgagtctgtcaggtggctctattaagagttggtatgtttcaactgtagtagtagcacccgagttccgagggcaaggaattacaacacggttctacactgagttgcaaaagcgggcaaaaatagcaaaatatccgatcgttacccgtacttggtcaaccaatcatgctcacctaaaaatattgcaccagctagggttcaagatggtaatgaggctacctgacgatcggggcgaaggtatcgatacgctgtattacaagtggggggaaaatgtttgaacacttaagtctgtggaaacgaattaaggcatataaactggcgatcaatgtttgggtagttttacttttaacatttcttggaatcgttagcgtatttatttattatttagctgattattctgggtttattggcaacttggcaatcgcggcatcaacctcattctttgcttcagtattggtattaattagcgaaacttaccttaaatttcgttcccatgaaaacgatatttttcttgagggaatagaaaagctaggaatatctaacctccattttcagaaatctgaactgctgcgttcactgatgcgtagatgcgaagaagatttttgggctgtggggtataggcagattttaactgcttctctttcagaccagatagaagagatggctagtaggaatattaaaatgagatttttgcttgtgccaccctgggaagaagcatatcagctagtttacggttcacaagatcgggtaatgagtaattatctaaaggtattcgatgcgattctttttggtagttcttcctcggcgaatcattgcgaagtgcgattctgtgataagccgctatttaacgacacctaccgggtagatgcagattttattactggaccgtatatgcacaatcgggataagcacaataagaaaatatcagcgcaagattttttcacttatgaactcaaacgagaaagtggtttacatggccttgtaaaggatgagttcaccgctttatgggatgaatgtgatacccaacttgattgggaaaaatatcgaataatatcggaaaagattcataactcggatttaaatgatgcggaaatccaagaaaacattagggaagcaatagtagaaatttcggagacgcagaaagaagaaacaatttcagaagtggtgccagcaaagccatagtccctacaatatttgcctgacgtgaaagaaactataacctatctttttgaaagttattacataatgaccattcttgaagatagggaagatttgatagcattgagtggctcaaatcttagggaggtactgtggaagaccatcaggatatagcgtttcaaccagttattttaggtaccgatattggtacctatgcgttggcagtatccttccatcagaggtggaaagtaaaacctaccatcgtcaccacccaaatcctggggccaataatgttttccggcattatcgacactcgcgtagttgacccacagactctgcccgatccggactcggaaatccccctaattgatggcttgattgcactcgctccgaaactgcaaaaagattattcggggaagaaactgctgctaattgcaaatattgattccaatgtgcgcgatattatgcgacgcgaggaagagctgcgtaaatattatgcatttgctttcccctccctaaaaattattgaggatacctccgataaagtgaagtttccgaggctcgctgccgaacatggtttgaacgttcccaaaactttggagatcgacttttccggttccttagagggagagctagccaaacttgagcaagtaggcgagcctttcccttggattattaaaccagctactagtgccggttatgaacgtcttaaatggccaggcaaagccaaggtttacacggtttccaataaagaggaagctcaaaagctactagctgacctgtatcagcacactcatgaaaatccgcacgcccgccgcttcgtgctgcagcctcgggtggaaggcaatgatagttttaatctctcggtgaccgcttacgttgatcaaaatgcccgggtgactatgctgggatcagcccaggtgttactggaggatcattctcccactgctctcgggaatccagtagcgatgattaccgagccctacccgcgtctatatgagcaggtgagcagctttctaaagggagtagggtggcacggtttcgccaactttgactttaaagtagattcgcgcaccgggattgcctactgcttcgaggtaaacccccgtattggacggaactcgtattacaacacttctgctggcatgaatccgatgaggttctttgttgaggacgtagttgaggggaaagcggtttcccctcaacgtttagcaaagcgggtctattactcaatcctgccgaaacgtttagtcttgcgttatgtagataaacagatgggtaagaagatcaaaaccctataccgtcaaaagaaaaaccatgatcctctgttctacccggcggattttggttttagtctgcgcggcctgaaacgttttgggtacgtaatgattgcccgggaaaatcattggagaaaatatcaccataactatccggtcgctagattccgcgaaggggaaacgcgttccctcgacacgtctgcgctaacccaaccctagttgcccgattccggacgatcgatggagctccgcagttttaaagaaacaaaggctaacagataacgctactctaagcgatgattagcagggtgtcttcgcccaagattttcgcgggcgaactttccagtttcccggaggtaaaggaaaagtaggttccgtcctctacctctgcaagcaaatctttgatgttagcggagctgctatgcaagttcactattacccgagcgccttccgtttttaagatcagtagctttcgctgacgttcaagagcaataaaatcagcgaagacgccctcgcggcgcaacgcgattaagtgccgataccaggcgagcatctttttatgttcggtctcagaaagctcctgccagagcagcttggagtttaaaaacgtggaaagggcttgcggagagggaacttccacctcgccgccgtaaattttatcccagtcatgagaagcgaactctagtttgcgtccctcatccaccgctttaccgatgccctcatcggcatagtcggtaaagaattggaaacgggagcgacttccccattcttcgccttggaagagcatcggggtaaagggggaagctaaaattaaagcagcttgaccagccagaagccccggtgaaagtttctcgctggggcgatcccctaaagcgcgattccctacctgatcgtggttagacgcaaagccaaagaaacggttgcgctccatatctgccggaactggagccccccagttcttgccgcggaaactagagagggtgccgttatggtaaaagacctgcgaatatatcttggttagggcctcggggtctgcgaaatcttcgtaatacccttgggtttctccggtaaaagctacgtgaataccgtggtggatatcgtcatcccattgcccatccattccgtagccgccctcatcaacggcagtgaccattaggggatcgttgagatcagattcagccactagggttaatggcctccccagttcttcagaaaggttctcgacttcttgggaaagttcggctaaaagatgcagctcggaatcgtcttggatttcgtgaaccgcatctaggcgcaggccgtcgaacccatagtcagccagtaaagccaaagctgagccgatcaagaaatcgcgtaccggggcgctatcggggccatctaagttgtagccatcaccccagggagtttcgtggcgaccggagaagtaaggagcgaactgacttaaatagtttccggaggagcccaaatggttcaagaccaggtcttgggctaccgcgattcccaggttgtgcgcctcatcgataaacgccaccaaatcttccggggtgccataagggttgaagagggcgtataaaccgaccccgtcatatccccacccgcgctcgccagggaacactgcgatgggcattagttcgatgacttcgactcccaaatcggcgagataggggagtttttctatggctgcccgcagggttccctgggcggtgaaagtccctatatgcaattcgtaccagaccttgcccagtagtttttcactgggttgccagctagaggtgtgtttaatagcggcaatatcagcggtctttacccaaagttcactgccgggaatatacaagcgtgcccgcggatcagggaaggggccgtttccgtctacttcaaatgcataggtggtcccgttgggcagtggtcgcggagctagccaccactgcccatatctaatcatggaagttttccggggattatccggcgagcctaccagtaggtttacctgctttttatccggtgcccacaatggtacccgcccgcatccagcggtcagttcccagggaggaaccccctcaaaatcccagtcacaggaatctagattcatttattccacccgttctagtatccgcgcgccgcgtttggctaacagttcctccaagctctgcattcccccggagaaaacctcatttgaacaaatatctttccacgatccttccggtagaaccacggtatgttccgggctgaaatcaccttgataacgggcgaggacgccggaaaggcgacgggcaagagtcacgatttgtggcccggtactttcggttcctcgcgcaaaagctactgcgtagccagtagagagggcgagcgcctcataggtggcggaggcagaaacgaaacagtctgggcggcggcgccgcagccgcaaaatagcggctgtcaagttcagtttcaaatcatctatggtgggactcccagcatgatctagaccttcacgatcaaggcgcgaaagtgcctccgccagcgccgtgaaatcaaccgggcggcgattatctgggtctaccagggaagtttgcgtgatttctgagccttgatagacatcagcaacccccggcatggttagttgcaaagccttattagccacgatggtatagcgggtagccaggccggtttcgctctgccagcgggaaacaatctcggctacctgcggatcagccaggatcttttctgcataatcaagcagttcattttcccgggttatatccggggctgtccaagtagtccaagttttttgttccctaatcgctttaactaaatactctcgcaaacgggaaggcgtaatcgggccgttgtcatcccaggtgccgataagtgtttgccacagcatattttcgctgcgcccatccaggtcattaggacaatacggttgggtgaccgcacgcagatttgaaactacctcggcccacagtgtggggtattggctgataactgccagacgcatccgcacatcctcacaacgtttggtgtcgtgagtggagttggtggtcatagtggctggccagttagtttgaatatcgcgggcaaacaaatgcaggctatcggaagaaatcccgaatgcttgcgggctggaacctacttcatttagacacagcaggtgggtccaacgatagaaggtagtatcttctactcctttagccatcactgctccgcaaacctgctggaagcggactaggaattcttttcggtccaggtcgctttctttcaaagctgcggatccgatttcatccccgagtaccagggcaatcaccaccgccatagtgtcagagtgctccggttccaggtggcgcagggcgcgccccgctgcggcctctacaatttcccgcgagagtgcgggggcgggttctcctacggttacataggcgcggtaacagggcatttcgataattagttcccgcaagcaatccactagataacggaaagtgtaatcacgcaggcggaaatcattttgacaaattttccaaactaattgcccgatgcgccgcacttccgcggccagggaagtgtcaataatctgcgccttagcttcgcgctgcatttgcggataagaggagggcgaatctgcggtcaaagtctgcatcagggttcccagcggcaaggatgcacgcgggtctacctgcagggcggtcagtctccaagaggtgtcatagccggtagtgccggcaattggccagtcgttaggaagtcgctcggcgccctcaaggatcttttctcccgctatccaagcgcccccggtagcttccgacagccagtggaaatagccggcggggtcagccagtccatcggggtgatcaatccggaaggcatcgatatatccctggttgaaaagttccagaagtagggcgtgggtggagtcaaacacgtcgcgttcttctacccgcaacgctgccagggtgtctacgtcgaaaaagcggcgatagttaagttcttcatcggctactttccaatgcgccagacggtagtgttgccgctccaccaagacttctaggggcagggcttcggtgccggctgccaccgggaaatagtggtcatagtagcgcagaatccattgctcgccccgttcgggttcggtagggattaccatttgctcgagtttgagctcttgatcagctaatacttgcccgatccgcttacccaggatgggcatcagaatcggctggtcaatatcaatatcgaaccagtgcgcgtaaggagaatccttcccgcgtttgagcacggaccacatggggcgattaagccacaccggggtcggcactgccatatggttaggtaccaggtcaactacaattccaaagcctgcctggtgggcatcagcggctagtttttcaaattgggcgcgccccccaagttctttggagatatgtttatggtctactacgtcatagccgtgcatagagccgggaactgcttgcaaaatgggggagaggaacagatcggtgatccctagatcacgccaatatcccaggtgcttgcgcgcgtcttcgaaagtgaactcagaacttagttgcagacgataagtgctgatgggagtgtgcctatcgcctgacggcaagtgggaatgttggccggtcatttgaatctccttaatttattcctccgccacttcgcggattagtaccactaccgagcgatctagtagctctagttggtcgttttcgctgtactcagtttcgctgtctgggacgtcctccatagtggaaatcgcaatcttccagcccgaaccgtagccttcgggaatctggaaagtacagggctccgggtcagcgttaaatagcaacaggaaggaatcatcaacaatgcgttttccgcgagaatctggctcccgaatagcctcgccgtttaggaaaatcattagggaacgcgcttcttcgttattccaggcttcctcggtcatattttgcccatcgggtgcaaaccattcaatctctcccagctcggattgcccgccgcgtgaaggagcacccgcgaagaaacgtcgccgatggaacaccgggtgatcgttacggaatttaatcaggtgtttagtgaacccgaggagcctatttcgatagtcgtcctcttcagcctcttcgaatgaccaatccatccaggaaagttcattgtcctggcaataggtgttgttgtttcctttttgagtacgggcaatctcgtctcccataggcaacatcggtaccccttgggagaggaagagagtagtgaggaagttacggtgttgacgcgccctaagtttaataatttctgggtcatcggtcgggccttccaccccgcagttccaggaccggttatgggactccccatcgcctccgccctcaccgttggcctcgttatgtttctcgttataggaaaccaggtcgttcatggtgaagccgtcgtgggcggttacgaagttgatagaagcatttgggcggcgtccgctttgttcatacaaatcgggactgccgcagaagcgggaggcaaactcgggcaaagtggcgtagttgccgcgccaaaagtcccggacggtgtcccgatatttgccgttccattcgctccacatggaggggaaaccgcccacctggtagccgccatcgccaacatcccagggttcggcgattagttttagctgggaaagtaccggatcctggtggataatatcgaaaaatgcggacagcttatccacgtcgtggagttcgcgagccaaagtagaggccagatcgaaacggaaaccatccacgtgcatctcgattgcccagtaacgcaaagaatccataatcagttggagcactgccggagagcgcatcagcagagaattccccgttccggtggtgtcgaaatagtgcgctttatcgtcctctaccaggcgatagtaggaggcgttgtctaaccctttaaaagagagagtcggccccatatggttaccttccgcggtgtggttatagaccacgtctaggattacttcgatccccgcctgatgcaggtttttcaccatttgcttgaactcttgaacttgcccatcaaccacgtcttgggagcggtattcggcgtggggagcaaaaaaaccgatggtgttatagccccaatagtttgatagaccccgctcttgcagggtggagtcgttaacgaactggtgtaccggcatcagttcgagggcgtttactcccagattcttcagatattcgatagtcaccgggttagcaatccccgcataggtaccgcgttccttttctgggatctgctcatttagcttggtgaaccctttgacgtgcgcctcgtaaataaccagtttatgcaggtcatgtccgggtggccgatcatttccccaatcgaaatagggagtggttactaccgaaaccgccatatccggcaaggaatcatcatggttaggttcactggggtcgttccactcgtaggaatacaaagactgttttgctcccacgactccatcagttgctctcgcataagggtcgagcaaaaacttatttatgtcgcagcggtggccttgctctggatcgtaggggccttccacccggaaaccatagcgctgttcatcgcgcagtcccggaatatagcaatgccacacgtggtggtcgacttcgcgcagttcgatgcgttcctcgctgccgtcttctgctattaagcaaagatagacttcggttgcgacctcgctaaatactgcaaagttcaccccggctccgtcataggtagcgccgagcggatacggttttcctggccaaatctccatacatctaggttgtcataaaatgcgatttttggcagtcactcgcgcctattaactgatcctggggtaattcccacatctagccatcaatatatctgctaggtaaaatcggtgctttcactccggatttgcacctactttgctacaatttacgggaactctctgtttcattgaaaaggataaaatcatgccggatactcccactaatccgtttcctgcggtttcgccgatgccgaatgcttggtcgggagataccggagggaactttgcttctccttatccaccaccaggagcagtaagcccgacccccgggggcttctatccggtaaatagcccctatccaggatctccgccaccaggagaggcgccctcagaacaaaaaacctctactcccgtcatgattggcctgatagccggggttttagtggtggtcttagcgaccctgggatttctaatttggtatataactgggaataacaagagcgaagcgcagagtacagcaagtccggagactaccacccagaccagcactatcgtcgaacgagcgcagccgcagcggccggcaccccgggttagtacccgagctgcctggtctcctccggcaggagtagcagcctgctccggtatggggggcgatgttttagtcaatggggttaccagctgcgaattcgctgcaaatgttacttctgattattattcgtcggggggatcgtccgtgctttatgatgtttattccccagtgaccggacagtattacgatatgagttgctccggagtaggaagtgactctagcggagattcctgggcgctgtgtaccggaggaaaaaacgcccaagtgtatattcgtcgctgatttccaagcctagtgacatcttatgtttgaacaggattctccccagcgctggcgctccctgaaaatcggtgccgcggcagctttaaccgtgattgctgctgcggctctaatcctagctttggtggtttcggcgcgcgcctatattaatttggtttctcccgctagttccttgccgtcttcctcgcccgcctcctcccgtactagtacgaaccctccggtgtctgcctccagcgcacccaccactagcgcttcggcagatactagcggtcaaggaaaagaaaagatcgcgggcgaggtttcgcggattgagcaaagccggggagcgcggatccaggtgtcctggctagaaggagggcaaatccagaccgcgggtagcctgcaggatttaccggcttggtcgacttcaaaagtaccggtggcgatggcaatctatgcacaggggaaagcggatgctaatagcgggaatattagcgcggctatccgggcttctgataacgcagccgccgaggctttatggcaagggctaggatcatccgacgcccagcgtgcccaggcggttaccgcgattttgcggcaggcaggagatggacacaccacggttcccagtacccgcctgcgcagcggtttcactattttcgggcaaactcaatggagtaccaccgatcagctgcaatttctacaaaactttaattcgttgccgggggcggcgcagttaaagtcccatatgtatgcggcttatggtaaccaacgctgggggatagggcgcctaccgaattccgcagtaaaaggagggtggggaccgactttgagcggcggctacactgcccggcaaataggctggttccagtcggaaggcaaggaaactccgatcgcaattgccgcgcaagccagttcttttggggcggcaaccgccgtggttgacgaggtagccaaactgttctattaggagctacctgcactttttaactggcaagcggacgcagaggcagcttaaaccaagggcggcctctcattgcgtccctaagataggggcctgcgaagcctaaacgacctggctaaagctgttagctacgttagctgctgtttgggctcagccttgctgacggcgcttgatgagcacgccagatccgatgattaccgtggccaggagagctaaccaagcaaccggggtaccggtcttagttatttcttctgggggagtgggcggctcgtgcgggggcggcggggtagtagatagcttatttactaccgttacttcccggcggattaccccgtctttatccgtcttgatctttccagtttcgctttcatacttagcgaagggaacggctttaatcgtcccgtcgcctccgatttcacgcaccccatagtagtagcgctgcttggcctggttgctaaacggcagtccctgaagggtcttagtccacccctcggccttagtgacgtcaaactttttgaccttcttggcatcgctaaacttggcgtcggttgcttgcagcagctcaaaactgactttgtcaggggtttttgcatccggtaccggttttccggaatcctgccatagccagtgtttattaaccgtaatatctaccggattaggtaccgggttaacaaccgtggctactagccaagtttcgggcagctgcttagaacgatccaaagctggccgctgcggcactttgccatcttcttgttcgactacctgccagggttttaactgcaaggttttaatcactttgccctttgcgtttagttcctggacaccgtagtagtagaagttcccactttcatccttaatcggcaggtcgttgaaggttttacgccagttttcctccggattatttgagggagcgagcttgaagtcggcaactttttcagctttgccaatcttttctgcctgagtgaaatccttgtcggtactgcgaataaaccgcatctttagttctttgaccgggatatcgctggcgcgggcaggtagttcgggagcttcattggtttccttcccggcatctccggcagaggtatcgtcaccagcgggttccgcgtcctggtcatagagccaagccttctctacggtggcctgcgcatatccccaatcaccgaaaattaccccaccattggtaccaatgccgcccccaagttgagcgctattgtcttggatcaggagttttgctgcagctttggcattttccttagcggcatcgttgatgggcacggtttggaatccctcattttgaatactcatgtatttcagaggcaagcgtttgggacgttctttttctggcttgttcagggatgccgggtcaaaacgcgcatctttttggtcgaagtagtaatcaacgcggcctcccccgagcatatagtcagatacccagatgggagctttaccagcagagcccagattgatatgggcaagatcgttacccagggtgtcggcagtattgtcaaagaccgcgcccccgttgtggatgcgcaactcaatcgagccggtaggacatgaccaaatgccacccccagcggctccattatcggaggttgccttattttgggttaccagtacgtcgtgtagatgcaggttataggaggccgtagcaacgtaaatgcctccccccatttgatgggatttgttattcaagatttttccggcatttatctccacttgattagaaaccacgttaactccgccgccggtacgtaaagcttcattattcgagatagtgccgccattgaaaataaaggaagcgggggagagcttgccccactcttccttggttagtccccactctctacctaacccatcaatctccttaaaagtgcggtctgcgccccatacatagaggtctagggtgccgattccgcccccgttgccagtggtgaagttagaatcgaccaggccgccgttcatagtgatgacggcattcccgaaagcgaaagcgccaccacccgagaagtaggcatcattgttttggatttttccgccgttaatagtgatgtagttccgggtttctagagccttttgcaggttggtagccgaggctttatccgtgttgaagtcgtatcccaacaggcctccggtccagcctttattatgggagatttcgccgccgtttatggttactgagccaccttggtaaacgccaatcccacctacttcgccgtaggctccatgctcatatgaggtttcgccgtagctgacttcgccgccattcatgacaaactgagcgccttcagttattgcgatatttgcggccccggattgtgtggttgtggcgctgccaatcttacgtttattgtcggtaactttaccgccgttgaggacgaacttcgcctctttccccctaaccgtaatcgccccataacgctgaccggtgccgtcacgaacgccctcataggtgccgccgttgatggtcagtgagccttcgttatagatcagttccccgccgccgggtacccactctccacggctgcgcagataaaactttccgcctttctcgttattacccatggtcagggaggcgcctttattgatctgcactatgaacccggtgaaaccgtcctcgcgtaccaggccgccctcggatgaagcggctccccaaggggcgatcccgtttacgagctcaatatcggcgccggcagggatgaccaccgtagaagtgatcatggtgtcggccattccactcaccacaatccgggtgggggtggtgccggcatccttgattaattgacgaagtgttgcctcctcacagtaggtgccgcattccactactgtgcgcccggcagcttgcgcagaggtggactttattttttccggagctgccagccaggctattgccaaggcggcagtcagaattagcgccactgcctcggctattaaacgtccagttattctgcggtttcgcatggtagacctcaagattaggagggatgttggtcaggctcaaccaatagtgatgagttacctttcatcctaccttactgtcgtctatgaatccgaacaggaaatttttctcctgacagctgctactgaattacctggttgctaacagtctccgagaccagtgaaatcgctgtccaaatctataatttcctgcaagcctagcgctggatcttttgttagaagatcttcaataaatccccgtttatctttatatttatctttgtgagcattgaaaaaatcgagaatcttttcaatcaatcccagcagctccccgttgcgggcagcatcagcgattactccctcctggattctttccagattccataaagctaatagcttagaaaatagccaatcgacgtcagcttcttccacaggtactttctttccatgcaaagcttcttggaaatgcttttcgtcatctgcgtctagttcatcttctagaaattcgagagcatcgaatactccctgataaagccacagagaatcttcagggggaaagagcaataaagaaccgtcatcttcccgttgccgggaacgcaactcaccaaaatctccggctagcagccggtcgcgaaattttgtcatcgctcggcgtctatttctccaggcccggtcatctttaaaagcttctagggtttttactcgggtagctgcagcatctttcggccagtttcccacccaggtggcatcgacaaaatcagaaaagttcagcgaaaccttttgcacggcgccatagtatttttcaactaccaggaactcgcaggttcttatccaagtgaggtcgccaccgtaaaaaatatggggataggtaaagggaagccgccgatcttctattaccggaacccacaccgaatccatatcgtagccgtagtcatgcagaaccaagttcggattgcctgctatttgttcgccaatagtagctagtgcctgcgccaagggtacttccattccttccggaggttctaacccatctaaatcgtccaggcagtcgacaccttcccaaagctcctccaccaggtcacgagggatttttatcttttgctctttcagagcattaagaatcagcatgagcgcgcacccaggctctccaacctctaagagctcttccgcattgctatgtagcaccgcgtcgtacctgcctttttctagcaacaacctccacaaagattcggtgcacgaataattaactggctcgtcacgcttagggtctttcagccggtagctacccggccactcgaaactggtatcaaaccttgcttcataagaggcaacgtacgcatgtaagtcttcggggaaatagcggagtgctgattgcgccataaacctcatgcgctcatcaatcccgtacagggtggaatagtatgcccaggcgatagcgccggtgattgcccccatcgtgtccgcatcgccccctaaccaaatggtgttgcgaatagcgtcctcaaaactaatcgactctgtaaacgccctgatagcttgaggtacggtaccttggcaggattcatcaaaatggtagttagccttgatttcagcaagcgattggttaagaggatagaaatgctccgaaatgtagtattcgatttcctgcttgcttcggctcttgcgcgctaaatagatcgccgcggccaccgcctgtgcgcctttgataccttcggggtggttgtgagtgactgccgcacttatttccgcaaatttgagggcttcctctaggctcttagcgcattcagcggcagccgatacccgcatggcgctgccgtttccccaagagttataagggtgcgggttatcttcaaatagccaagctgcaaaacgtcctccataggagcccataggctcggggaagcgccgccctatttcctgcatacgttggaccagaagcccggagaggcgctgctcagtgcgctcggaatctttaaggtttagccaccttaaaaatgccattccctgagcgatagtcatcaaagagtcatcggtgtagttagccccatagggaaacagctcaaaatcacggcaatctaccggtgagaactctcgggttgagccaataacatccccgataattgcgccgatcataactgctcctcccgtaagtggattactgctgtatttactattatgtgctcctgttgtatataccggcaggaaacttccggttttctgttaattcgagaggttaaggggaggatcctgcttactatgcttagcgcttagctatagctgctggggttaagtgcgctgcttaaagggtataagctctccggattttcatattttgggcaggcaaacgcggaaactgtagcggcaatgcgggggagcagctcgccgtcatagagtaggagcgatgcatttttcacagcgagttagcctttcgcagcccaacgccatcaccttggcggcggggaaactgcgcgcccagggacagaaactggtaaatatctctgactcgaatcccactcggcatgggttaggggaagcaggcaacccctaccaggcagatccgcgcggtcagcgcgaagcccgccgcgccctcgccgattttctttcccagagggatggacgcagtgtcagtcccgataacctttatctgcttagttcgacttcccaaggctactcctggctgatgaaactgctgtgtgatcctggcgaggaagtgctggctccgacgcctggatatccgctgatagaagccttagcaaacttagaaaatgtacaggtggcgtcctatagttttgcttggctaggacgaaaatgggaactagatccgctctcgctgccagctgcgggtgtttccctgcgtccgcgtgccctagtggtcatcaatccgggtaaccccaccggcgcctatctagataggggagagcgagagagggtgcaagaatactgcgtcgcaaataatctgcccctgatcgccgatgaagtgttctatgacttccccttggctgcggctccggaatctcgtgcccgcttggccggttgccctgaaatcctcactttcgccctcgacgggttatcaaagaatctgtgtgcccccggtttcaagattgcttggctagaggtgtcgggaccggaggtgctggtggaggaggcgaaagcccgtttagatatcatcgcggatgcgttcttgccctttagtgatattttggccgcgcacctgcctggtttcttgaagaaaatcccgccgcagttggcgcaaactcgcgggcggtgcgccgccaacctggccatgttgcaagacttaataggggaggatccggccagcccggttacggtgatgcccccgcaaggcggctggaacgtgctcgtgcgtttccccgcgcatatcgatgaggacgagctggtggaaaaactcttgcaagattttgggatttattgccagcccggctacttttttgatttgcccttcgctggcaccattagcctgtccctgctgctagaagaagattctttccgcgaaaatgccgccaaagtaatgcgtaccatcatgaccttgagctaggggagcagccggttttctagtcctgctccaagcgattagcgggcgtattttgattaatttgcatttactcgaatgcttctagagcttctggttccagatcgccgccagcaacccattccctaactgtttcctcaatctctttggataaatgcacgttatagtaagaagcccaatcgagtgctaactcgatattgataccatcatgacgctcaatttctagtaaatcattcactacagatacaagccctacctcagatatggcagccaggatgccctcccacaagtcttcagaatattgcatgttataaatcgcccctgccgagatagaagattgctgtatcgctatgactgctagcttattgctggcgaccttgcctgcaaagcaagcgcaactaccgtaaatctgcgaaaagagttgcggaagaaatctgccgtttacgaatctgccccagtatcgttacaaatatggcaaacagatccgcatcgggatctaatataaatgccagggttgaaaggagggagtcaccgacggctctagtgatgaaggctcgcgattcgcgtgcctctgtcaatcaggacggcaggggattaccctgccattggttcacagattgacatggaatttgccacgtcgtggcaaaagaaagccctaggctgacagtagatcgttatggaacttcctcctttcaaccccatagtgaaaccggcaaaagtcgcgcccgcgcagattaactcgcttaggcatcttctgcgtttgcataacctagagaatccagaagaatcgattctgtatccgtctgcacatgtagcaatcagcagccataatacggcagaaatttggctcgatcacgataaaactacaccgctgcgtaaagtccccttgtactacagatatcgaagtgtccccaagcattctgggggcaggcggatattgtcggaaccaagttccagtttgaaaagtctacagcgatggatactgcggcattgcttcaccgacgatatggtttcccctgccgcctacgcatatcgcccgggacgttcaattcaagattgcgcagccgtacatattggcgctaaatggctccttaagttcgacctcaaggatttctttgggggaatttccgaggctcgggtatatgaactctttagagcgattgggtataaagaacttgtcgcgtttgaactagcgcgtctgacaactttcctgccggataaaaatctaagacgcaatattcaagcgctatataacgaaaagttcggaataaccccggcggcgcggaactacacgaagctcgaaataacaagagatagcagcgacggcccctacccaaggtatcgagacggcgcggggaagatcatacggggggtgcttccgcaaggagcccccacgtcggggattatcgccaatatctgtgctggcgaactcgataaagagcttgcgtctttagcgctgtatagcggtttaagatattcgcggtactgtgatgacttgtttttctccccgcggcctgaccatgaacattttgaccgcagtttcgcaggattaatcatccgtgacgttaatcgagccgtactaaaacatggttttcggataaaccaaggcaaaaccagggtagtgccacccgggtctaagaagctgattttgggtctgcaagtggacgacagcgttcgtctcgataccgcgtttaagaaaaatattgactaccacatacgcggaattgctaaatttggtctccagcagcacgtagctcacgccaaaggcactccacccccggtattgagtttcctaaaccatctgcaaggtctaatcgctttcgcgaaaggaattgagcattggtacggggaaacacgggaaacaaacctgagaaaggcattatcgattggtgaagtaacgcgataattcccgtaaaaatcctactgacgcgggctgagcgcgtagtaacggcaccagtgtagattcataaatttaggggtacagtatccatatttttatgattagagccgcactatttttagcactatagatgccataatttaaggactatgttgcattgtgcctgctagattagcttttacttaattaacttattgagagaaactgccagcttctttcaagcggagataccaagtagtagagggggtaggccggcatctgctgttgctttttgtggtgtgctctctttggatagcgtctcggatacggtgtgcaatccaaagattaggaatattgttgttcatatggaaagcgcccgctaacaagccgaagaagaaaacaaccaaccctaagctatgaaaaacccaaacctgaaagcctacggcgaaacatttgccaaaaacatagggctagtcttacgcgggaagatcgtccagcgcggcaacgacattaaaaccatcgcgccgcttgctggtcacgcgccttcggtcatttccaactggctaaaccccaagcgttcaccaattcctttatctgctctagcacatatatgcgagatcatcggagaaaaacctcaagacgtagtagcagaagcatacaaaatgggagagcgtcagtcgtgatctatccggactggtggggaagtacaccgcctactattgagacgcttacctcatggtgtgagaccacccaggttgagttatacatggactcgcagctcctagctcacgaaactttccacgcagcagcacagcatgacggacaccagaccgcagcagttgaatcccgtatagatgaagccgtagcgcaagcggtaatcaacgctgccgattatcgtttctgggaatcacgatacggatggtctacaggtggtatagccgccgcgctaggtgtccccgccggatcattggagcctaccggcgaaaactcgcccaacagcaaccgaaaatagtaatgaaatagttaggagaaaaagtaatgacagatattgaagatcgcgtcagtaacctttcggacaagctcgccaaaacacgcgagtatataaaaactgaagaagccaccaaaaccgcgttaatcatgccgttcataagcgatgtcctcggatacgacactacaaacccggcagaggtgatccccgaatatcgctcctcctactcgtacaagaaaaatgaaaaagttgattatgccatcaagcgcggtgaccagataagaatattgatcgaagcgaaaccctacgggattccaatctcacgggataacgccgcgcagcttgccttctattttcaagcagtacaagccaaaatcgggattctaaccaacggacaaatctaccagttttacactgacttagacgccctacacgtcatggacaaaaccccatttatgaccctcgacctagacaacgtagatgaaaagctactcccggaaatagacaagctaactaagagccggttcgagattgattccgtgctttcttctgcggagaacctaaagcaagtgaccgctgtgaggaagtatctgggagttatttttgaaaatcccgataaggactttttgcagttgatggcaggtgttattaagcccggggcggtgaaaaccacgaagctgctagaggctatagagccgtcagtgcgtaccggtatggcacggtttataggcgatagggtggcggccaagctgaaaaccgctatggaagtcaatagtacggagactgatattagtgaagcgcctgcagcggcggttaaagaatctaaaattgagactactgacgatgagcttcaagggttctttatcgtgcaagctatttgcgcggaagtaaccaatcctgccagggtgcatatacgtgaccagcagtcctattgtgggatcctgttagatgataataaccgtaaacccctggttcgtctgctatttaatgggaagcagaagcgggttatgtttttcgatcaggacgataacgaaagaattgatattgataccccaactgacttgtatcaatatgcgcagcgcatcaaggatacggtacaaaaatacggttaacggttggcagttaatcttgctatccattttggatgtcagcttctggtttcgctttattgcgtcgccaacgagcctggcgaaaaagaatcggcggtgctgcgcaccagcaagggttttcggagcacagcctccgaaaaccactggcgcgggcgaacgctcagcccgcgttcgcgacctccccgtgccagccctcacgggttcgattccccgcggctccatatttcattaagagattcgggttagtagctctcttacgcgcttggtaatttcgtcgcggatttcgcgtacgacctctacgggtttccctgacggatcagcgacctcccagtcttcatagtgggttccggggaaaattgggcatgattcgccacatcccatcgtgattacccaatctgccatcttcactttcgccggatcaagtttttctggctgcgcaaacggctctaaccctatttcggcgagggcgtcgcgcacctcggggtgtacttcttcggccggttcggtgcccgcactcatgatggtcacgtcagatctggctagttcttgcgcaatggcagctgccatttgtgagcgaccagcgttttgtctgcaggcaaaaaggattctggtctcggtggctccctttcggcttgtgggttgttgaggcacgtgtttagcgacaaggtcaaggagtcgagtatcaaaatccggggcgatcgaatagtaggcccacttaccctgctgttcgcggcctaatatgccagcatttaccagcctggtgagatggtgcgaaatggttgaccgactgatattgaaaacctcaggaaatgagcatgcacacaccgggttcggtgaacagcgatatatgaacagagccagttgcagccgcgtgacatcactaagtgccgcaaaaatgtttgccgcttcctgacattgaccttcgccggcgattgcaggtgcggggcagcaatttggagcgtgttgactgttcatacaagaactctatcacacgtttcgacgtccatcgaaacgtgtgatagagtttgtgtcgattcgacaatcatcgaaatgtaaggagttaactgtgcgtcaaatcgatatctatgaaccggctttgtgttgttcttctggagtctgcggaaccgacgtagatcaggctctcgttgatttcaacgcggcgctgaccgccctggataaagagggcattaccgtaacccggcataatttggcttctgcccctactgattttgcggcttgcgaaccggttcgcgcctatatggaggtagctggcacagacggcctaccagttactgtggttgatggcattatcatcgcgactggttcctatcccgaagccgatcagcttcgtcaattcgcgggggcatccctggagggaaagacaactttgcccgtagttgagtctggttgttgtggcggaagtgggtgctgctaatgtcccttcctgaactgagcaccaagtttgcgtttttcaccggtaaaggcggggtcggaaagactacggttgcttgctctttagctacccgcgcggcaggtgtaggtaagcgagtgctgctagtatccactgatccagcctcgaacattgggcaggtattcggccgtgagatcggatcgggcggagcagagctaaccgaccttgtgcccggcgctatcagttttgatgcggtagagattgatccggaggcagaagcggagcggtatcgcgagtctatcctgggtccggttcgcggcctgctgccacccgaggtgctagcaacaaccgaagaaaccttgtccggttcctgcacggttgaagtcgctagttttaatcgattcgtcgactatctaaccaacgaagacattactagccactatgaccacatcattttcgataccgccccgaccggacacaccctgcggttactgtccttacccggtgattggtctagtttcattgataaaggcgcgggtgacgcctcatgtctgggtccgatgtcggggctagagaagaaccggcaaacctatcacgaggcggtagctgctctgtctgacccggcacaaacttcactggtgctggtggccagggctcaaatctcgaccctgcaagaagctaaccgttccaccggtgaactacttgagatgggaatcaaacccgcactgttggtgatcaacgggatcctgccagtgagcgccgctaccgatcagctttcggagtctatttatgcccgcgaacaggcactacttgatggccttgccacgaatacacagctgagcgcgatcaatagtgttccaacggtacggatcgagttgaatgctaacccggtgatgggggtagatggcctgttacatctgggcgaggctgacggcgacgcaacttcgagcgcggatcccacactagagccgggccctgcgcagtccaattccgagctgcacgtcggtttatcccatctggtggatgagctagcagaggggaaaccgaaactcgtcttgtgtatgggcaaaggtggggttgggaaaaccaccgtggcgcaaatgctggcattggagctcgctaagcgcggcaagccagtgcatctgtccaccacggatcccgcgaatcacctcgatgtttccctcgaagatcgcatcaaaggtttgactgtgtcatctatcgatcctgacgcggtgacggctagctaccgtgaagaagtgctcgccaccaaaggcgcttctctcgatgccgacgggtacgcacagttagaggaagacctgcgctccccatgtacggaagaagtggccgttttcaaagcattttctgaggtcgtagcaacggtccaaaaccagtgggtcgtcctcgacaccgcccccaccgggcacaccctgctattactggacgccactgggtcctaccaccgcgaactcatgcgccaatccggacgtgacgattccgcgaccacgctccaacacctgcaagatacggaagtgacccggccaatcctcgtgacactgccagaaaccacgccaatgcttgaggcacaatcccttgcagccgacctgtcgcgagcaggtattgagccgtgggcatgggtgatcaaccagtcgctcccggcaaccgaaacgtcatcgccgttcctgctacgacgagccaatgcgcaacaggagataattaactcggtcgctgatcaggcaggggtacaagtggttcaactgcccgtcatgctcgaccatgaactacgtgaatagcgatttaccgaagctaagtcatataggtcacctcgtctcgtccgccagttttaaatggttggacagacgaggtgtccgtttttattctgagacttaaatggcttgaatccttgttattgcgaccaggcgatatgcaccgctcatccagatcctcacgccactgagccccaagtgccatccgttgcacccaaccgtcagtcagcaacctccccgagtgaatggcttgggtgcaatccggggtggttaggcttgatctttgaagatgatgttgatggtgccgtctgtgtctacggcggcttgtttgactagggtgttccaggcttgatcgctgtattccagtggtggctggcatgctaggtagtctcggatttctttggcttgtgtttggcgggtggtgaggtctgcgatcttgtttgtgattgtttggtgttctttttcttgctgttggtagcgttgttcgagttgttggtagcgctggtcgtattcgtcggggtcgtgtgctgtggtggcgttttcggtgatgagctggtttattaacgccatggtttcttccatctttttagcgattttggtttgccgagtttcgagttctgttgtgtcgtataccgtgtcgtcaagtagctgtatcacgtgatcgagggtggcgttatctttgactcgtttggttagggcttgggtgaaggcttctttgatttgttgtccggtgacgtgtggggttgtgcagtggtagccgggcttgtatttgttgttgcagcgccagatgtggcggcggtatttgctggttgagtgccagactttgcgtccgtaccagccgccgcagtcggcgcatttgatccgggtggcgaacgggtgcgtggaggcggttccttttcctgatcttcgtgctagttctgcttgcacgatttcccaggtagcgggttcgatgatcggctcgtgaggcaggtccggatcagcgtccaccgacagggggcgtccaccgcgctcatccacgtcgccgatgacggcgagggcatcccacctgaccagctcggacacatcttcgaacgcttctaccggggggatgccgcccgcagccgggacaacggcggggcggtatcggtctgaccatctccaaggcattgatcgaggcccacggcggcactctcaccgcccccggacccggtcgcggagcggtgtttgccctccgcctcccgctgtcccctcccgacagtgaggaggctgctcggtgaccacaccctgccccgcgtgagggccgtgccctccacccattgaaaatatacccccccggggggtataagctagagagtagcatcgccgtatcccaccgacccgtaggagctttcccatgatcgcctccccgccccgcctcttgccgatggcctcccacggctgcagctgttgcggacctgcctcacgtgccgacaccgcctccatccctgccgccagcgactcgtcagcaagagggtcctcccttagctaccaggtcaccggcctgacctgcgggcactgcgcgaaaagcgtgacccaggcccttcaggccctccctcaggtcgacgacgtccagattgatctcgctgctggtggtgtttccaccgtcacggtcaccggtgtcgtacctccggagatggttcgccgggccatcgaggaggccggctacaccgccttatcctgattagttttacccatcatctcgaccccgaccgggttgagcgaaaggaacgtcatgagcactccccaccattccggttatcaccatggtgatcaccccgctccggaaacagaccacacctaccacccggatcatgccagccacgaacaccacgcagatgccgacacccacggccaggcgatgcctcacgatcacccgcactccgccctggacgaagaccaccacgttcatggtcacggcgaacacgccggacacagcaccgcaatgtttcgggaccgcttctggtggtcgctgattctgtccattcccgtcgttattttcagccccatggtcgcccacctgctcggctaccacctcccggcattccccggatccacctggattcccccggtgctgggcacgatcatcttcgtctacggcggaacgcctttcctcaagggcggatggaaagaactgaaatcccgccaacccgggatgatgctcctgatcgccatggccatcaccgtggcgtttgtcgcctcctgggtcaccactctgggactgggcggttttgacctggacttctggtgggagctggccctgctggtgaccatcatgctgctgggccactggctcgagatgcgcgctctcggggccgcgtcctccgcgcttgacgcgctggctgccctgctgccggatgaggccgagaaagtcatcgacggaaccacccgcaccgtggccatctccgagctggtcgtcgacgacgtcgtgctggtgagggccggtgcccgggtgccggccgacggaaccatcctcgacggagccgccgaattcgatgaggcgatgatcaccggcgaatcccgtcccgtcttccgcgacaccggtgacaaggtggtcgccggtaccgtggccaccgacaacaccgtccgcatccgggtggaggctaccggcggggacaccgccctggccgggatccaacgcatggttgccgacgcccaggagtcctcctcccgggcccaggccctggcggatcgggcggcggcgttgttgttctggttcgcgctgatctccgctctgatcaccgcggtggtgtggaccatcatcggcagcccggacgatgccgtggtgcgcacggtcacggtgctggtcattgcctgtccgcacgccctgggcctggcgattccgctggtcattgcgatctccagcgagcgggccgcgaagtccggggtgctcatcaaggaccgaatggcgctcgagcggatgcgcaccatcgacgtggtgctcttcgacaaaaccggcaccttgaccgagggtgcgcacgcggtcaccggtgtcgcggcagctgtcggcgtcaccgagggcgagctgctggccctggccgccgccgcggaggccgacagcgagcaccccgtggcccgcgccatcgtggcggccgcggccgcccatcccgaggcctcccgtcgacaaatccgtgcaactggtttcagggctgcctccggccggggggtccgggccactgttgatggcgctgagatcctcgtgggcgggccgaacatgctgcgcgagttcaacctcaccaccccggccgagctcaccgacaccaccagcgcctggaccgggcgtggggccggtgtgctccatattgtccgcgacggtcaaatcatcggtgcggtggccgtcgaggacaagatccgccccgaatcccgcgccgccgtgaaagccctgcaggaccgcggggtgaaagttgcaatgatcaccggcgacgcccagcaggtggcccacgctgtcggtcaggacttaggcattgatgaggtcttcgccgaggtcctgccccaggacaaggacaccaaggtcacccagttacaggagcgtggcctgagcgtggccatggtcggtgacggtgtcaatgacgcccccgctctgacccgcgcggaggtcggtatcgccatcggtgccggcacggatgtggccatggaatctgccggggtggtcctagccagtgatgacccgcgggcagtgctgtcgatgattgagctgtcccaggccagctaccgcaagatgatccagaacctgatctgggcctctggctacaacatcctcgccgtgccgctggctgccggagtactcgcctcgatcgggttcgtgctgtccccggccgtgggcgcgatcttgatgtctgcctcgaccatcgtggtggctctgaacgcccagctgttgcgccacattgatctggatccggctcacctggctccgaccgagtcgaaggaggaacacaccacgcctactccggcatccaccgccgtccactgatccgccacttctctccactgcccccatacgaccctgaaaggctggtgctgttgcaaagttgtggcagtaggaagagcgacgtgaactaatcacagccatgggtatcttctccggtcgcaatttttccccgtgacatcattctgtgggcagtgcggtggtactgccgctacggggtgagctaccgcgatctggaggaaatgatgaccgagcggggcgtgccagtcgatcacaccacgatctaccgctgggtccagaaatacgcccctgagctggacaagcaaacacggtggtaccgacagttacctgactggcaggccagttcctggcgggtggatgagacctatatccgggtcggcggcaggtggtgctacctctatcgggcgatcaccgccggtggccagaccctggacttttacctctctccgaagcggaacgtggccgcagcgaagcgtttcctgaccaaggccctcagatccaatgcgtcagccgggtatcccagagtgatcaacaccgataaagcaccctccctagccagggcaatcgccgagttgaagtcagagggaatctgcccgccaacagtggaacaccggcaggtgaaatacctcaacaacatcctagaaggcgaccatggtcgtctgaagcggatcctcgggccgaaaggcgcgtttaagaaccggacatctgcatatcggacgttgaaagggatggaggcgatgcactcattgcggaaagggcaaggcacaatgtttgcctatgggcaaccgaacccggacgcggtgatcgtcaaccgggtcttcgagacggcctaacaacgcccacacgcagcggcgatcagggaatgagaaactgagtcttcgctgctctccgcccaattttgcaacagcacccgacgaactccattgagtcgtttaacaatgaactgcgtaaagctactcgcaatagggtgcagttcactaacgatgaatcagcacccgccacaggaaataatagaaatcaaggcaaatgcctaggagcaaaactcggggcacttcagtggtatccacagaaatccacgttggttgcagtgttcgatagcatttaggcgggcatgtcggtatgggcctcttggcttaaggccatgggctttttagaaaacctcctcaaccgctacaccccacgcatgccgggcaaatgaaatcataagtacatacaaccacgctgtccaaggaagatttagtaagaatcagacctaactagagttcaaaaaacaagtagcccgcgttcgtcatagacactgccacctatttgaccgcttccttttcggatggctcggtctagggccatgatggtggctactacgccgtcgatcttctcggtggatttttgtttgtcgggtttgatgtttcctgctgggtcggtgcgcacgtgaatgttatcgaccatccaggccagcaccgggtgccctccatgcgccaaccgtctttcgagggcgagtttcatcagttcctttgatggtggggacatgtctttgaagccttgcccaaacggcaccaccgtaaacccggcatcctccaaattctgtgacatttggacagcgccccaccggtcgaaagcgatttctcggatattgaatcgggtgccaagatcctcaatgaacttctcgatatacccatagtgcaccacgttgccttcagtcgtgagtaggtggccttgctgatgccataggtcgtaggggacgtgatccctagaaactctgagtttgaggttgtcttcgggtatccaaaaccagggcgcgaccgtgtatttgtcatcgtcatccgtgggtgggaatacgagaacgaaagcagtgatatcggtggtggatgccaggtcgagcccgccgtaacaaacacgtccttctaactcatctaagtggactgggccatcgtttttgttccaggtgttcatgggcatccaccgcacagactgtttgacccactggttcaaacgcaattgtctgaaggtgttttcttcagccggattctgcctggcactattacaagcgtccctaactttctggattggcaccgtcacgtccaaggatgggttggctttatgccacacggcttcattagtccaatcatcatcttgcgctgccccatatatgactggataaaaggtggggtcgtgctttttgtcatctagaatgtcttgggctttttggtgttgctcgtagcagatgctgtgggtgtcggtgccggcggttgtgatcaggaagtacagcggctgggtgcgagcatccccactgcctttggtcatcacgtcgaagagcgcccggttgggttgggtgtgtagctcatcgaataccactccggaaatattgaatccgtgtttggaataggcctcggcggatagtacctggtagaaggaattagtaggggagtagatgatacgtttttggcttctaaggatctttacccgcttggctagtgggggacacattctcaccatgtcggctgccacttcgaacacgatggatgcttgttgccgatcggcagcacacccataaacttcagcgcgttcctcgccatcgccgcaacacagcaagagcgcgacggcggcggctagttcagatttcccttgctttttagggatctccacgtaagcggtagtgaattggcgaaacccgtcaggtttgaccaccccgaaaaggtcgcgaatgatttgttcttgccaatcaatcaacttaaaaggttttcctgcccaccggcctttcgtatgctttaaggcttggatgaacgcgaccgcaaaatcggctcgacgcttgtcgtagcgcgagctttcagccatgaaccgtgtcggttgatattcagctagctgacgcatacgaatcagttaccttctgttggttaaaaagtcagttgctaccggcgatagcaggtgccctcatgcccggcggactaggcttcgggcagattagctaacgcccaggcgatcgcatgtcctgcgtcagcgaaaaggtggtctgactcagcgatgagttcgagttcgcattctccgcggcccctcgagttaggcccgaacccgctgacgggttcttccatcaaccggtagatttgggcgttattgccaaatccttcagtcttggtccaggtagcaaaacttgctagcgtgtagcctccgtaggcaagaaccgtcccgtaggaatcaacgctcatctggagggtttcgctggtgacctttgtgctgttcatggctggtgcctttctgttgtgtaccgtttcggtatgtatatacagccatagacttcgctacttatccagtcattttccgcctattttcaagaaaacttagagatgtacatctctaggtcataacgcttcacgataaaggcaaaccccacgccaggtggggtttgcctttgtgtttagttttaacgggtcaggtggtagttgacaacgtttcctggtgtagcatgctcaagttcacgcaccatcgctgctgcccgcccgtatccctcggtgacttgttcgatgttgtctaggttcaacgctccgtaggcggtggtttgcatccgccattgatcggtttcaaaatcccggtcaagctccggggtgtaggggaacagcggggaaggaacaatagaaatcgcgacccggccaggttcaatctcaatgctggtgatggtgtatcccaaccggttagcacgtccgataaggcgttcggtgttttcttcctcgacgctgcattcaggttctttggtgttcatggctgtttccttatgtgttgtgtaccgtttcggtatgtatatacagccatagacttgcctacttatccagtcattttgccgcctattttgcctaataaatagtggtttacatctcttggttagtgtttacttgtggcggggttttccatgcagaatcaccgtttaatggtgcaagtaagatcttgcgtacttccttattttctttaccagaaagtccgatgcggtaaagcagggagcgcagttcatacttctcattcaccaccttgtcactcgcggcgcggtgggtggtgagcccgatgcgtttcgcatatgcgaccattttgcttaggaactcggtgtatgccgtgatcttctcgaactctggcagctcatcccaccaaggaaaactcagcccctcgctactggtggtgatgctaagctggctcgcgccgagcgctttagcgatcaagtctttcttggctgcgataagttcatgcagccttgccagctcagtctcatcaagcgtggcgggtagggtgactacgagtccgtagttttcagcctttttggtgttcaccattgctcatcctcctcaccatcaaattcgatgctttgaacgtccatccatgtgcggatgaggcgcaggtagttgtctggaaagttggagacaatcatttctacgtgctcgtagccgtggtcttcggctgcatcccacaccgcaccaatatcggtcaggtcgactccgaggttttcgatttcttctagatcggcgtatagctgtcccatcatcaccaaaccctctctttcttgctggttgtttggtcatgtacatacagccatagcttcgcgggcttatccagtcattttcgccttaaaatcaaggagttttagtggtctcggcgactatctgagtgagcacgagtttggcgcacggcaaagctatcccgtttccccacagcttgtataacgcccggtcagtgacgggattggcgagccattttttcacttgtgctcttgttttggtttccttcaaacctgccgctactgcccacctggcccagacctgccaccagtaatccaactgtgaatctgtaggattgctgattgctaaatctcgtgtccaatcgtcagggaagccttgtaggcgggcgcactcggtgggcgtaagcctgcgcaccctataaccgctaggttgtggcgcggtgacaataggcggatcagtaaaatccgaggcaagtagaggcccggtgaggttgttggtgcccttgcaaaagaaatcactctttgatgccgaaactaccgtgtcgactatcgcaatcccaccctgattacaggtcgggcagataccgctcgtatctaaagtttttgcgacctcggtttcgtagccgtacctgccagtccggcttttacgcttggtatgtatagcgttgaaaccataagcgatgggctcaaaaatcctctgatcgttattacaaccaagcctgccagaaatatcggtttggataagcgggtctttaccacctccagtttttccgcccctcatgcgtggcgcgaacgggactgctagagattctttttcgggttcgttgcttgttgggcgagagccttgtgcaagattggaggtagcggcttgcctcttaccgcagccctgcgcaagatcattcgtccatcggtaaaaccgcctgttggaattgaagtctgccctgtccgctatgcgtatctgctcaatggtcacttcatcaacgccgcactcacgcagcagcttttcctccgcttctttccagatacgccatttcctgtcctcccgtccgtggttgtatgccattctttcttcctccaatcagaattgattgagagggcagagaaaagccccctcattttcccaaaggaaaaaacaagggggctgaacgccttaaattttaattttctattatctttcttagttttcttaggattctggctttgcgtttgttcacaacgctctgggttatgcctaacctcgccccgacttcacgctcggaaagtccgtcaaaaaagattgcctgtatcaactcctgctcactatccgacaacaaaggcagggcggctttcagcctgtccaccataacagcattgacaacggtttccgcaatgtccgccgcttcatcagcgataaagtccagaggattcccctcgctgtccgtaaatccgtccagagatagcaggctgttcctcgcatctaatttttgcaggtaacgccaccgctccctgtcacggtagaagtccgcatattgctcccttacgacttcaagcagacaaccttggacggggataaacagcttgtccatatatcccttgtcggcttgcctgcggcggcagaaatccgtataggacagttccacatagccgccgctttctttgatatatacttttcttggtgcgtatttcaccgctaatacctccaatctgaatttttgaaatgtaaaaatccagatggagaggcggggagcggcaacgcacaccagaaacagccctgcggcactttccaacaaaaaacgacaaaagaaaaaccgcaaaggctctgtgaccttcacggttatgggaaatacaaattctgttgtatggagattgtacttccactttcaaggtgagaagtaccgctgcactggcagaaatttttttaactggtttcctgccattctctgatatgctatgtattgataaattttacttcgtatgagcagatgaataaccgcccgaaaaaagaacataaaaaaatccctccaaatttaaaaacaaattcagagggtaatttagggtataacaaaataacccacccgaatatcgttttttttatttggtgagtttgttctttcaaatacgaaacaaaaagagccgatgattcgtgaattgttccacaatttcatcggctctgcgtcttaagcgtctggctctttgatgacagttatcttcaagttgtcaactttaatcaagctttcttgtctgcattttggacaataaaggggataattctccaaaacagtgtccttcctaattttattacgggttttgctcccacaaacaggacacaatatccattcgcatttcatcataattagtctctaatcctttcaaatctcattttatatgacttttgcaagctgttaagctaacttgtggaacatatgccgaaccttatctatacggctattcgggcggcggggttggcaaataaatttaccaatagctggctggtatccttttaactctgtcaagcagactccctgcccatttgtgaaataagttaaatcgttcctgtattcttgaatacatctggcagggatttctcctttcagaatgacctcgtcattctttacctgagtacttacaatatctgcacaataccttggggcatcatgatacgcccgtgagagatattcctgcggtgcataaatttcaaagtggagatatggctctaatagttctgtccctgctttttttaaagcctgctccaatacgataggggaaagcagccgaaagtctgcgggggtacttacaggactataatacaatccatattcaaaacagattttacagtctgtcactttccatccatacagcccctgctcgcagccataaagaaccccctccataaccgcattttggaacgattggtttaaatatccaagtgaaactctgctttcatactgcactccgcttccaatagggagcggctctatggacaacccgacagaagcccagaaaggatttggcgggacttctatgtggatggtatattctgcttttctaagcggtctttccatatatataacagtaggctcttttatttctgcctccacatggtatttttcctcaaggatggcacaaatgacttccatctgcacattccccaaaaaagaaagtataatctcatgcgttgtagtatccacataatattttaaaagagggtcgccatctgaaatttctgtaagtgccccaagcaatatttcccgctgttcagatttctttactgcaatcgttgtttggagcatagggagaggattttcaataaattttctctgcggcaacagcatttcgttccccaaaatactgtttagctgcaaaacatcatttggtaaaattacaatatcaccagagcaggctgtatcggatgaatataattcaccgtttgtcggaacacacatctctgtgatttttattttctctttttcagatattttaataacatccctcaaatgcaatgttccgctatatatacgcacataaacaaaacgccgccttttctctgaatattcaatcttaaaaacctgcccgcatagttcagattgaccttcaggcgttgatgaataaaacttactggcaatcacttctataagctgccgaatccccagattgtttttagcacttccgtgataaacgggaaataacgttccgttttggaatctcctgttttcttcctgttccagttctgacattttaaacggtttccctgacatatatttctctaatagttcatcgtttcccataattaccgcatcccactgttccatatcgtcattgtccgttacatttatatggggatgctgcccaaccttttgcttcactataatttccgaagaaagctttgctttcatttcttgatataccattggcaaatcaatcccctcttggtcaattttattgatgaaaaaaattgtcggaatcttcattgtctgtagtgcatgaaacagtatacgggtctgtgcctgtatgccatcctttgcagaaactaataatactgctccgtctaatacggataaagaacggtatacttccgccaaaaaatccatatggcctggcgtatctataatgttgacttttacatcctcccactgaaaagatgtcactgctgtctggatagtgattcccctttgacgctccaaattcattgtatctgtccttgttgtgcctttatctacgctccctggttctgcaattgcaccactggtatacaataaactctccgttaatgttgtctttcctgcgtcaacgtgagccagaatgcctaagttaattattttcatgtgattttcctcctatcaacacccaaaaaagggcataaaaatacccagtgataaatactcctatcactgggtaaataactccaatagccccaaaacacttatatgttttcgggcatataaaattacatgataaaagtattcttaaactgggtacaaaaaactaagccccatattaaaagtgaaacgggactgctactttttgttcccactatcaaattgacagtttatttaagaataccttgccgcatatttattaactccttgtataatactgaatctaattatattccttaaccctttatttgtcaagctgacaaactaaagcagaaaaagcggcaggatttccccctgccactaatcatctgtttatgcaaaaataatttccttttccacaatctccctcgcacaagcccttatgttattgaggcatcctgtccattccaaggcgttttctgcctttagctgttccgttatgccctgtgcctgtttcataccctctatgagcctttcaaagcgttcctgtgcctgtctgtcaatgtcggcaaggtaagcgttaagtctgccgcttgtaagaagattggtgtatgtaactttgcagtgatgcttcagataatccaaatgccgctgtccccagatgcctatcggctgttcttcttcggcgggtacagttaagcacggtattaaataatcgccttgcctttcgtatttgccgcccatttcctcaaaaattgtctttgccattgtctgttacctccacattcttttttattttgaatgtccgcaaaatccgtcctacattccttgagctgcacgagggctcaaagagtatgtgtccggcacgcccgcttgcaaaatctgcgacaaggaagatccgtttgcgtcgttggggtactccgaaaaattgcgcgtgcaatactcgccacgcaatactccattggtctgccacgatcgctccagctttttgccacttttgtactcgaggtaggttagctgctgcttgttcgtccgtgacgctgatgagttcgcgtaggacttgatggaaatcattgcctttgttggaggagaaagctccgggcacgttttcccaaacagcgaatcttggataccgtccactacttgcctttctcatttccttaataaggcgcaccacttgatgaaacaaacccgaacgctcgccagctaaacccgcccttttacctgccaccgacaggtcttggcaaggagaaccaaacgtgaccacatccaccggctctagctgactgccactaatatcgcagatgtcgcccaggtgttgcatttgtggcaaacgcgtggtggtgaccaggatcgggaagggctcaatctcgctcgcccacacaggttcgataccaaccttggttgccgctagtgggaaaccacctgagccatcaaaaagcgagccaagccttaaagtttgtctcacgagttagcctttctccttgggacgctcaacctctttcaccagatccaggtaggcatactgcttgccaccacgctcacacgtgatccctgctgcgtctccggttgcttgggcatagcggcgcaggatcaccgaggcgtatttctcgtcgagctccatgcagtaggcgatgcggtcggtggcctcgcacgccatgagcgtggaccctgagcctgcgaaggtgtcgagcacgatcgcattcgcctgggtggagtttccgatcggatacgccaacaagtccagtggcttgctggttgggtggtcggtgttgcggcgcggcttggtgaagttccagatcgtggtctgcttgcgatccgcataccagcgatgcttaccggtcttgacccatccgtagagcacgggttcgtgttgccattggtagggagagcgtccgaggacgagggagtctttgacccagatgcaacatccggagagatagaagcctgcgtcttggaaggcgcggcggaaattcaaaccttcggtgtcggcgtggaaaacataggcgctcgcacctttctcacaaaccccgaccatgctcgaaaacgcggcgagcaggaagtcgtagaacttattgccatccatcttgtcattcttgatcgacaagcccgagccggattcaaaggcgacattgtatggcgggtccgtgagcacaaggttcgcgcgcttcccatccatcaaagcctcaacgtcggtttgtgaggtggcgtcgccgcacaccagtcggtggcggccaagcgtccagatatccccgcgctcaacgaaagcggccgcttcgagtgcggcggtgaggtcgaaatcatcatcctccacctcaccctcatccaatgagccgataagctgcgcgatttcggcgtcgtcaaaaccggtcagttcagcatcgaaatcggaagcatccaggtcggctatgagtagggcgagtttggaattatcccaatcgccactgatcttgtttagagcaacgttgagcgctttttcgcgggtttcgtcgagttcgacgaccacgcagtccacggttttatagcccagatcagccagtactttcagacgctgatgcccacctacaatatttccggtggttttgttccagatgactggctccacatacccaaactcacttagcgagcgtttgagtttgtcgtagtccgcgtccccaggttgtaggtctttgcgggggttgtagtcagctggggtgagatcacttatggctatttgcttgatgcgcatggtttttcaccgccttgacaagctcacggctagtagtccaggtgtcttcccacttgcgtgtgtaatccccgaaatgcccatacgtcgaatagcgcacatagccgggtgctcgcagcccaaactggtcgatgattgctgctggccgaagattgaacacatctcgagccgcagccgtgagaatctggtcggtgtattggccggtgccgagcgtgtccacactgaaagcaaccgggtcggctttgccaatcgcgtaactaatcgccacctggcactgggatgcaagatccgcatccaccacggttttcgcgattagccgcgccatataagcacccgaccggtcaaccttagaagcatctttaccacagaaagctccaccaccatgagaagccagcccgccataggtgtcaaccatcaacttcctaccggtgagtccggtgtcggctttagggccgccctccacgaaccgcccagaaggattcaccaaaatagtcgtgttctcatcgacaggaagatacgaagagcaagctggaccgataatcatcgaggtgatttcacggcgcaacacctcgaaatccttggatttatcgtgctggacggaaaccaccaccgtctctacggcttgcggttttcctgcgtcgttgtagcgcaccgaaacttgtgctttaccatccgaaaggatcccagtgatggttccttgcttgcgcgcgtcatctagccgcttacaaatctcgtgggctaaaacaagaggcaatggtaagcgctgtggtgtatcagtgcaggcatagccgtagaccgtgccttgatcaccagcaccctgaagacaataagcggactcatcgccatggcgagcctctaaagatgtggtcacgccgtcgttaatatcgttagattgacgcctcacccatacgtataccaaaaatctccacggcttatagccagctgcagtaagtgctgtgcgtacgcaatcacgcaagtccacacgagcattagtgctgatttcaccagtgacaataatgcgtcgcccagtagccatgacctctaccgcgacgcgggcgttgggatcggcgtagagaatttcgtcgagaatctgatcagcaattagatcgcacagtttatcggggtgaccgatacacactgcttcagcgctgcgaaccatagtcataggaatgccctttcagtagaaaaatcaaaagaaacaaaaactccccaccatcagccaggagtggggagcgaagaaaatgaggaaaacccgaatcgtgtgtgatactggaatacgtggaagacgaaacgagtaaacctaatccgcaggagcaggagccttctggtggcgatggtaaagccgtggcttacggaatgattgccgggataatgaccgccataatttttcggttcattatggacgataatgccttagcgataactattggcacgggagtcggaatcgcgctaggggcaggcttcagcgcaacaaaacgccccaaataagctcaaaaacactaggacgcatctaggagcgtgctttcaacaactgctccataacctcatcacccggggccgcacccgaatagtcactggtgcagttcgcccgcacaatctcaaaaatctcataccagtacacgtttgcttgcttaccaaaagattggctcatcgcaacgaacggggaagcgatagcagctcccgtggtcgggtgcttgccgagcaaaccgaacttggagattgcctgctcgcactgcacataccgggcgaaagcctgggcgtaggcctcaatgagacgcttagaaacaaacttcgtgcagccgcgctcatcaagccagcgccacgtctcccgatacacaatgtccgcgcccaagggtttgccatcgcgctgaacctccgacagatactcgccaggctcaggcatcacctcaccagcaagcaccgcgcccgcgccaacatctgcgccctcgaaatcgaaaggggtcgctagcggatcttccaggcgagtagcaggcagacccttggcgagtttctcattgagcgggtcgggtttcgcgccagccctcacgcggcggccgccacggttagtgccatctttcgccactgaagtaagccttactgttaaaatatgattttgaaaatggttcgagagattttggtaagtatgcggacaaatcgtacgtatttcaatcgcagcgctgtatggctgtgttttctgtttgcctcactactgggtctcctcatgtttctagcgcagatttattattcaaaagatagtgtggtacggggcgcgcctttcctgctactaggaaaacctgtcaatattttgctacttcctgccgctatttacctagttgtgtcagttttagctttaatcttgtttatcgctacgctgaagcaaactaatagtgacattaaaaagagatgggtaaaagcaattctcatggttgcgtttctaacaggcacagtagcttgtgtagggactgtcattaacatggacagttacggcatagttccctctaagcaagacgataccaattgtcgggttatctattcgtggggaaatagcgcgatgtatcacaggtttgggcgattctataccgtgtcgaacaattttcatcttggcgttaaaacgccgtattcgtggtcagccaaaggctcaggaaaaatagatgacaccgcttgggaagtgcgctgggaatcaggagtcgggacactccgcacttattcgagtatcggaatagaccctgacacagatatcccagcgcacttcacctgcgacgagtgaatgcgctttagcctttacttagacatgttgcatagatgtatgcaagacgattcgcttcgctttgattgggcaaacgatcagcatgagcagccatagtgagtgggcctcccaaaactggaactgtggttccagcccaactatcgatcagattccagaaagcctttttcagattatctggtgaagaagcaaaccggatttgataaaactcaagaatccgaatcgattgcgatttactacgaagctgctgcaaagcagaagaaagctcttccgaattctcccaatagcgacgcatcaagagataagcatcagcatcagcgagaacatcttctcgtccgaatcctttaatgtcgtttgcaactccaatatgcctgcccatccacgtttccatagaatcagacgttccggatttaaggaatgctccccagatttgcagtaagtctaaggcccatccacccaaatctccaagaccgcattcttgtactgacgcatcagatccatgcgaagaataccctaaacatgttgcggcaaaatgagctatatcttctccagaaatctgagtacgtatatcagtcggcatcgatgagcagattctctcagcagaagcgcgatgaatattgttctcaggaacagtagtgggctcgggggtatatagttgccacattgcacctgaccagtatccatctgaccaatattttggttttctcaaccagcctaaggcgtagtgaccagcttcacctgccggaggagtcttaaaaacaagagaagcataatcgtcagcgtattgtttttccacagatgcgatccatctagcaaaaggatccgttatctcgctgctagagctatcgctagattccttaactgacacggcgcttaccgctggtatgcgtcctgagtaagcgactctgtctaagtcccatttacctttgtagccgtgtatttcgtggaattggtcgaacacccaattcttgggaatagaaaaaccaagatttcctgaaaaaccggtggacatatcggaaacgaacgacgcaaccgaataccctgcttcagccacacgagcacaaatattacgcgaagcataaatacctacacgatacccgccaccgaggttcgcgttcactgcgcggaagtacgggagaatattgctagtgacttcagggtcggtggcgtcgtaatctacggcgaagtagatgatggtgggtggcaccccgaggcgctgtgcggctgctcgtgctttacgggcatggcgagcaccattttctgcactaaaatgtctcagtttagtcgagtactcttggaatattgggaaatattttaatccgtgacgaacaattcgctctaactctccagtacgtaaggccttaaaatagtcagcctcagcagtgttctcttgacctggctcgctcaggtagcgtcccacgatctggtagccgtctgctttcaaatgcttggctaactcgtcagtgatctcgaaccttgtgtcacacgctacgcacgcgcggttcgggtcacctttagaggtcagtaggctcatccacgtggttggatcaaccataccgctgacaggtaatgctaaatcattctggaacgtacggacttttgaagcaatcgtagaattccatgttgatgtagggctaacagaatacccgttgcacactaaagccaccgatgctagccatacccactggctcgagccaccgctaatcgtttgtaggcgtgagcgggtgccgttaccaaagttaccggtcgcctccgcagggctgaatccctcgatagcttgcaacacttggatcagggcagtgttcatttcacgcccgtacaaaccatcagttggaacgatacccgtgtatgccttgtactggcgatttactttttgctgcgccgttcgaatagcactcttaccgccataggcagacaacagtttgaactgcttcattgatagcaatgccatcatcagctccagatcaatcgtagaagatgatgacgataacccgatatcgctcttcaaatcccgaatcgaagaagcaacattatcagtaaacttagttgtgatacctccgtattctgctgggtatcctttacaccacaaggcaccttggataatgccatgcacgttactgctagaatcatttttgctgatcccgttcggccaacgattcttaaaacgtgactgcgtcccggcaccgaagttattcgctgtggctgtgatacccagctcgatttgcagggcacgaatcaaagcgttgatcgtgtcccatccggttcgaccgttctctgagactgaaccgaaccctgtttttgttttatatgtggtatttagccactgctgggtttttagcaccatctgatccatgagaaaactcctcactcgatttattgatataaaaacccggcacccacaccccttcaataatgagaaagacgtgaatgctgggagcctaaataaactcgcgtaaacccttgtcccgccgccgatacacagccaaggcttcgaaacaggtaaaaccgtaggtcggttaataccctgtttgattcggtctttttgcgtacggttggccccgcccgctgaccttcgccaaggctgtagagattcgaggccccaaccccctaaccgaatcctcgacttgtcctgtaacttccggtgggaacaaggtcaatatttttagggtggggaagtaccggtggttatttcgcgtttttcaaaaaatctagtaggtgtagacctgaagggcttgtctccatctgtcaccgtctaacgcgctctgcctggagtggcagggtttgcacaggctgcgcaggttagaaaagtcgtggctgccgccatggtctaagggtaggacgtggtggacttcctgaactggggtggtcactcctttttccaggcagtcttcgcacaaaggatgctgcgcgatgtaagcagcgcggatcttgcgccagcgcgcaccgtaacgcttgttgattctcgggtcacgttgaaacttacggtagttcttgtctgcctttttggcgtggagctggcagaacctttcgcgggttagttcgggacagccaggcgcagagcagggacgttttggtttgcttggcaccagcctcaccgtcctttgctggccaagacgaaaccctccgggcagtgataactgtttgccggagggttcgttcctatattttcaactacctacagtatttcagggttaagtaacgatttccatagcggggttcggatacttgctaacgcatgggtgcaagttagcgtctgccatatagtgctactgccaggcgatctaatgctcggttctttcgccggtagacactgtctcgttcaatatagaagtggtcaccgatcatttggactcgttcgtcttgattgccttggccgaggaagaagttttccaacacgaactggtcatcggtgttgagtgcttgccaggcgggcaggaaccagtccaggtactcttgggcttgttggctgcgggcggcgagcagatcaatcttgtcgagggtggcagctatgcggcgttcaccagcgtgggggtcgcgtgagcggggcatgccagtgattttggggctaggggggctggcgaggtcttcgcgtagctggtttgcctcagcttgcgtgtcttggctggctgcttgttccatcagtgggtagtcctctagggcgctgattgctgccttgcgggtatctaagtatttcgtcatcacatgcatcatgatttctccttatctagagtggtttgccagttgtgttttgattgcctcgatcaaggcggtctgggtgaggttcttggcgtctagggctgtaagtactgcttcatcgagggttttttcagcgaccaggtgagtgatcgttaccggctgggtttggccttgccggtaaagccgggcgttggtttgttgatacagctccagactccaggtcagggagaaccagatgagtaggtgcccgcctgcttgtagattcaggccatggccggcacaggccgggtgaatcaaaccgagattgatctctccgttgttccaagctgctatatcctcagcggtctttaggagccgggcttgcgggaagcgctcgatgatgcgttccaggtcgtgtttgtaccagtaggcaacgaggaggttttgcccgttcgccgcctcaaccaaatcttcgagtgcatccagcttcgcgtcatgaacagcaatggcatctccgttttcgtcgtagatagccccgcttgccagttgtaggagttttccagataggactgccgcgttagccgcatccactacttgcccgtctagctcaatcattaaatcctgctctagacgctcatatgctgccgactcttgatcggcgagttttaccttcgtggttgttagcgtcagctcaggcaaagtgaggtggtcagtggtgcgcatcgacaatgtcatgtccgagatggcctcatagatctcgtcctcagcgcctgctcgcggtttataggtaaacacttgcatgccgccgcgtttatcaggtacgaaccagcgatccctaaaccgggtgatatagcgccctaaacggctaccgccatctaggagtcggaactgtgcccatagatccatcaagccattagaggctggggttccggttaacccaacccaacggcttacatagggtcgcatcttcaccagcgtggcgaagcgctttgcacggtggtttttgaagctggagagttcgtcaatgacgaccatgtcgaaaggccaggccgcgccgtagtgggcaaccagccagggcacgttttcccggttaatcaccgtcaccattgctaacttagctaacgcgtgaaggcggtcttgttttgatccgacggctaccgccaacgtcagccccgtaaggtgatcccacttggctgcttcttgtggccaggtatcgcgtgccacgcgtagcggcgcgattactagcactcgctgtacgaggaagtagtcgaggacaagctgccagatcgcggtcagcgcaatgacgctttttcctaaacccatacctaagaacactgcggcttcgtcatggttgatgatgaaacccgttgcctgggtttggtagttatgcggcttgtagcgcatttgccacctccgcaatcccatccacgctgtctaccacgaagacttggaagccttgaccttgcagctgcttgatacggcgattctggattggtctaggtttggctcctggtgcttttacttcagcgaaaacaactcgtccgctcttcagacagatccgatctgggacaccagtgacgccggggcacacgagtttccagcagatcccgccgatgctttcgactgatttcttcagttcgttttctaggtgtttttctttcatgtcacgtctttcataagatctgtgacactcgtgtcggtctgtccctaaaaccctatataggactgtattttttattttcctatagaaagggctagtaacgactgacacgactgtcactattggccggttacaggtcgaattcgctgatcaaggcgagcccgtctacgaatcgtgcccgagctgttcgtctccgcttatatccgcctttatcgacggcagcataaaaatcgctagtggagcgcacatactcgcccctgcctattgcccaagaccggtacgcgtcgtagagatccttggactgctctgataggccttgacctacctggcagcagtcctcaaggaagtgagcgaaccagtcgttagcagcccggtacgcctccgatgcggcaacgacttgtttaggtggagccaggtggtagttctcagagtgaattaagcgagcaccttccataatccacgccaagaccgctccgccagctttgacgtatagatggtcagcataatttttgatgtcctgttttggggtgatggtttgctcgaacggaatcacaatcaatctgcgccagatgccggtatccatagctcccactcgcggtagatggttcgtgtacaaaaccaaggtgtgggaaggggtgaaggagaaggggtctttgtatttcttctctgcggcgatcttgtcagtcgaagctaattgtttggttgatgaggttgataggcgcacgccttcatcattttcgccggcaatcaacaagcgtctagccctggtttctgccatctcgtgtttggcgttgtttttcttaccagcgatcagcacctcagaggagatagtctccgcgtaagagcccaacacgcgggcgatggtattccagaacgtggatttgccgttgtttccatccccgtaggcgataatcagggcttcgatgaggactttgccgattgctgctagcccgcataccctttgcacatacccaatcaactccttatctgccccgaaagtgacggcgaggctgtctagccatatctgcatcccctcatcggatgggtcaagggcagtttgtttagtcaacatgtcagcggggctgtgttcgtgccgggaggtatcgcgcaaatcaaaggtggcgcttggggtgttgagcagataagggtcggcatcgagcacctgcgggttaatcaacgctaacgggcgtgcttggcgcatgaccgccaagattgtgcgatctgagcggcacttgtatatgaactttaaccattcttgcgctgccatcatttcctggtagacctgggattgctcccgggtgaatgcagagagggctttggccttgctcatcgctaccagcattgctgttactcccagccggcttgcttgctgggtggctgtatccagttctttttgggcttgttctatttgccgggaggtgagttcttggacaacatgctgggctttaggttcgttttcctcccatacacccttgtcgtaggccatccacgcggtagcaggcgaataacaaatcctgtcagcatactcaccagcaagaatcgtcgcctgaccaacatcggtaaaatcatcagggcgcagactggtcagctgctcataaacctccggcggcacataacccggctcggcggcaaccttggcagcgaacttacacgcgctatcccaaatcaggcccaactctgcatctggtaatggcgggtcacaaagggtggctttacgatcaaataactcccgcgcctgggcggtgttgccgtagcggatcaagaccctgcccgcgaagcgagaaagcgtggcattacgagagccctcgccgatagcaatcgttgcggcatcaaaggcagcaaacatgtcctgctcatcagccgccgcgatccattcatccagtagctgtccaccctcgaaaacatgcacttcggcggtggggtttccgtagatgaacctacccgcgtccagcgcgttatggtcaaagaaatcaaaacgagcagccaggcgtttcttcatccctgcatactcgctagcgtcaccgatcttgcttattgggtagtagacatggaaacgcggtctagcgcactcgccgcccttgattctcatatggttgcgggaggttgcggtcataaactcgacccctgccatcacctcagacaaagattcgggcgtgacccattcgttcgggttttcggtgtggtcgttgtcgatatccatcaccacgcaatccgaaaccaggaagttcgcgctcgagcgatgattacccttgtaggtggctgcgacatgatcaaaacacaccgccatttctaagtcgggtccgctggtgatctcgtggcggttagggtagtggctgttggtttgcttgcctgccatgtcagtggcgtaaagcgtgaagggatgcatcaaaaggtaacgtcctggaaatcagcgttgaaatagtggatgggtagttcaagttcgcggccccactcgatctcggcgcgcatcccgcggctaacgcggccggtgtaaacccagatctcctcacacttggtcagcagaatccggttgaaaaacatcgctaactcacgctcatcaggatcgtcgtcattcaagaactgcggatacagcaaatgcggagtcagcggaatcacccgctggccgacagcgaacgcagaaaactcccgtgccagcacaacattggactccacgtcccctgagtagggtgagcagatgtagaccagtggccggtaaccgaactcggtgcgctggacgctttgcagtgctttgaaactagtcggatcgagatagccctcagcgttcttcttcgagatcccaaactcgaccgtcgacatagctgggcttgtcattaggagtcctgcccttcacgctcgataatgggcaacaggccatgctggttcttcaacaagtcatagataaacaagcgacctttctgcgtccaatacatatgagtgcgagttttaccgccatcaaactcatgcgtcttggactgggtataaccctgctccgcgtatctggcgtaaaggaaccagcgccccgactgtttaaactgaaccctcgaatcgagcaagatctggttcaaccgtttcgcgctcaacccgtagtctttggcgatctcggtcgttgtcaacaatgagtcggattgcagaacaatgtcgtagtacgagattttcggtgcagcctcaagcaaagcctgttcggcggcgagacgtttagctcgctcacgacgcaaatgaacaatcgcctgctcaagaaactcgtcattctctagcagatcatcgatggcgtagatgccgtggcggcggatcgagggcaacacctcatcgaatacccatgcttcaaaccggacagcggcaggcaacttcgaggatgcaatcaaccgatacagatcaccttcggtaatgaacctgacctgctggataccaccgggcgtttcaagggggtagcgtttcacgacccccttgcaatgcctagccagagcgtctttcgtgttcgcgtagccaagtgcggtagcgatgtcacgaccgcaaaacagtacagtcccgtcggcggtgatcgtgcggatcgttccgaacgtttgatttgtgaaagtctgtagtccggttcccatgaccggctcccttctgagaaccgggatatatgactcgtcaccgggtgcgccgagactgcggctctcagtagaaggccagaaacccgccaggagttaacccctctgggattcatcaatgaatgtgtcgcgaaacaagctagcaaccacaaatactgccggcacgtccttagatctgtatttgcataagattgatagactaattgccgggatgtctggatttttctagttattcttgtcagattcacttaaacacgcacgagcttacgattctcttgggaggtatcgcttgtcttcactgaatatctattgtgatgagagtactcaccttcccaacgatgggcagccgtttatggtcttgggggctatcgcttgcccttcctcgctctcgcgagaagtcaatgtacggttacgggaaattagagctaagcatagaattcagcccagtttcgaactgaagtggacaaaggtttctccagcgcaaattgatttctacctagacgtagttgattactttttcgacgatgatgacctgaacttccgtgctgttgtcgcttataaaaagggtctcgatcattaccgtttcaatcagacgcatgatgactggtattacaaaatgatgttctacctcattcgtaatgtgataccagcccagggtgaagcattcatttatttagataagaaagacacaaacgggcaagaaaagattgatcggcttcgtacagttatcgctaatgcggaattcgattttgatcgaaataatatccgccgactccaaatcgttgaatcccaccatgttggtttgcttcagcttgccgatttgctgatcggcgccgtgaattatgccaacagacaagatacggaaagcgaagccaaactgcgtctaatagaacgaatccggcaacgttctggcgtgagcctaactagaaccacgttgttgtcggaaacaaaaatgaatatttttcggtggcagccccaaaaatgatgcctcatcaacgcttcaccatcgacccggtacctgatcttcgctccttggaggaaggtaattatgtcgaaattttgtatcaaaaatttttagatgatttagtatttcgtgatctgccgtggaaaaaagacggtcttcaggtgagtcttcgtcgtcacccagaaattgatgggcgtcacgcgatcttttggcacattatctcgggcgggactggatcggaacactctcgtagcctagagccggggcgatgcgcccggattcattggatacgtattcttgttgaaatatttaactcagagttccctgaagaaaaagaaattcggtggtggattgataataagcgcgcttctaaaccgcgctacgttataacgagacccgaattcgattacatcgtagttatcgagcaacgtgataattacgctcttctcgtgaccgcatactatgcagagcaagaacatcgccgtcgaagactcaagcgagaacacgacaacttctggatacagcaagagccgcccactaggtgaacggctccagatactccttcaacacctggttgatgagctaagactagtctaacagcaaatcttgaaaaatgggcaatagaaagccaaacagttacattttcttataaaaatcacactcatatccgtctgcgctcaagggcaaacctttagcccagcctggtaggcgtgacatcagctggcaggcgtcttttaccgtgaagtcggaatctggtggctcgtcgatgacgatttcgtcgtgaacgtgcatcacgatctggtggccggcttcagcaacgtttttcatgccggtaacgagtagatcgcgggctatggcttgaacgatattctctgtgagtttgccgccataggtttccaggcgtccccacttttggccggtgctgattccccagtaggtgatggaggtgccaccgaaccggttttgacccaaacctggtttcacatacgccaaccttcgaccggacggcaaggtgatgaacaagatgcccgattcgagcgcaaaggtgaggttgcgcagccgaacaggctgtctagtggtgatggcttggttggctgcttcttctacttcttgccacaaccagacaatatgggggttagctgttcgccaagcgtccacgatgggtttgagctcgtcctcggacagtcccatgcgcaacgcgcccatcgctttgagcgcgccgacggagccgccgtatccgcaagccagtaccgctattttgcctttctgtcgtagcttgccgtttgcgccgtgtttttcaactggaactttgaacatgcgactagcagtctcacaatatagatccttgccgtcacggaaggcctcgagggtggatttttcacctgcgagccaggcaatcacgcgggcctcaatagcgctgtagtcagcgacaataaaccggttacccgaggtgggtatgaaagcggtgcgaatcaactgagagagcgtgtctgacaccgaatcgtagagcaactccagcgcctcaagattcccggtccttacaagggtacgagcttcatcgaggtcaggcagataattgcgaggtagattctgcacttgaactaacctgcctgcaaaacgtccggtacgtcctgctccataaaactgtaggagtccgcgcgctcgcccgtccgccccggagacgtttagcatggccttatacttcttaacggaagattttgcgagatccccgcgcagctgaagtatttctttaactacgccactagcatcctcgagggcgatttccacctcagttttcgtgagcgaatcgagaggacaaccgtttttagccagccagtctttaagctgtataggtgagttcggattctccaaaccagtcagctcttgggcacgagccagagttgtctcgcggtgtttttcatcgagggtaacggcggcatccacaagggtcgcatcgagcttgatcccagcatcgttaatgcgctgatccaaggcataggcttcccactcctcatccagtacgggaaacttcgccaggcgggtgtggatggcttgttctacttctacatcacggcggttatatttgatgaatgccttccaaccttccggatccgaggacggtagattacggcacgcgcccttgttgatgaggtttggggcagctggggtgcaaaactggcggatcagtttcttaccggccgtgtctttctttactggtaaattcagtacttttgctacttggtctaggctcattggcatcccaagatacgcggcccagatcatggagcagcgccactgagcaggatccaggaaactgccttgaggtaatagttctgggtggtagcggtgtagccaggcggacagacagatgcgttcgaaggatgcgttgaacgcccacttaaccacaccaggatccatcagagcagcaagtatctcatcgggtagtttttctccgctcgccaggtcgaccacctgcactgggtcatcatctacggcataaccaaacaataaaatctcaaagtcaggatgagcggaataggggtagaccccggtcttggagagattaagggggctataagtttccagatcaatacttagatatttcaaggtttaatccttcaaaatcaggtgtggtgggcagcaaccatacagctactgcccaccaccggtgtgtacttttctgctagttaaggaagtcctcgttagcagtggaaaacgcagcgaagtcttcctcagcgctgacgtgtccgccaccgagcggttcaccatcccgaattttttggatgttgcccagtccgcaggcgattcccttattgccattggtgttgaatgcatagaaggtaatgctcgcgcgggcgtagcatccggagtagacctgggagcgatccaagattggggagagtgactcgtctaccacttgaggtggggtagtggagttagcgttgacaaacatcgagttcgcgtaagcttcgtcatcgcgctctgtatccccgtcacgcaagggtaacttcagtgcggccttgttaggacgtttaccgccgaacttggcgatacctgcttcaatggctgcatcgatagcagcctcaatcttcgccagcgtcactttgtcagacttcgggatgatcaggcttaccgaatatttcggtttggatccttggatggattttgcctcgaaaagattcgcgtaggaaagacgtacttcgtcggtgatgactcgagttggattctttactgacatggttatttaccttctttctgtatttttcttggtttcaattttttgaaattcttcagccgcactcagcgctagcgcgggtcgtttatcggtttcaggcaccagtgcaggtttaccgggcggcttgataaccaactcgcccaggagctggccaaagcgccgcttacccaactgcttttccaacgccgtaatcgtcttgagcttgcgctcgaaaatgtcgttaatcccggcagcctgggctgtctctacgactttggtttcgtcggcatatttgcggatacttctgccttcgacgagtttgaaaccagcccaggtcttgccttgattgaccgcaagcgaaagggcgtaggactctacatcggatgcccagctctttagctcaggtagtttcgcgagcacctgggcaatctccgaatcggagagttggggtgggggagcgaactcgagtttggctaactccagattctctttagctctcgtgcggcaggtaggggctattttgcagaaacgacaccagctacctgcagcaaaagagccttcgcctttcccggccagcttcgctgtcggtcgcacaacctcttcagcccaggtttgaagatcagctacgctaacatgccaggtcgctacgttggatcgtctgggctggaagattgtcaccgccacctcgctaatctcgtagagagcatcgaaagcatgaagcgcaccgagagcatacaatgcgagctgcggatttttctcagcctgaaccagtacgccttgcccgtacttgaaatcaataatctgcaacaaaggctcggcaataagcacgcagtccccggtaccaaacccgccaggcaccagatgagagaaatccagtcgctgctcgatgagggtcacgggatccctgcacgtcttgcgcgcctcacgcaggcgctcttggacgaaagtaagataatcgtcggtgagagtctccatttcattatcaatccagtccgagaccggtttcatggttggtgaaaggtgtagagcgcgacgtagcttccactccgctagagcgtgagcgatggtgccttgttcggcagcggccgaagtagaatccggcaagcccgcctccactagggctgatggcgggcaattcagccaccggtgcgccccagaagccgataagagggcatgttgatcaggcatcagcaagtcccttcgcccgcgtaagcaaccatccataattagctggatctacatccgagagacgatcagcccccgcatccaaaatcagctgacgtacctgcttggtcagtccttgactggacaggtcagaaaggactgcgcgtacatcttcaagtgaaagcgctaaacctgtagtttcagccggagccgaattctctgcttgcgcctggttatgttcagctgctgcagcctcaagggctggctgagctagctgggcagcagcaataggccgcgtacctggcatgccaacatgatcctcgaggccttgccaggcagccgattccacatcagccgctaaagccgtcaccaactcagcaacacgattaagaacagcaataacgctgtttgcttgcgtgatgttcacttcggctcaccgcctttagccgcgcccacagcttcggctagtgccatcagcgactcatcgggtttttcacacacttggacttccacgctgtcggcatcgtcgcctgggagcagaatcgccatcttgtgacgaggacggctccttccgaacaccttccgcagcaaataccgtgagggacgaatctggcgagtagcaagcagcgcgtccgggtcggggcggcgagcaattttgatcttgagtttcgaagtcatttattttgttcctttctgagcgctgccttgtgcctcgctcaaaagaaggccagaaatatccgcagagttaacccctactgcgattagtgcttgtcgtaatcgcttcttggctttcttcaaggttttagagatcgctgcttttgacacgccccgctcggctgccacttcgaccgctggacgcccttcgataagaaccgcgattacaaccgagcgctgcacttggggtaggttcgcgattgcgtcgagcagtatctttcccactacacggatagcgttttctttctcttcgatagtttccttgtcacaaatgatgtcttcgggagatgggctggctccagccttttgcgagtcgtaggcgttgtagacctcccaagagcagaacctgacgcctttgcggtcttgacggtgatagccgtgttcgttgttgtattcctggcggtcgagctcagtgacgatttcaacccaacggtcttcggcttcaacaacaatcggatcaccagcgacggactggtaagtaatgaatcccatgagtggggttcccttcttctaaagggagacccgctcgaggaagcaagctcgcgtgtcaacgaatctaggcatgacggggtagagaaacgagaaggcaggcacccagatggatgcctgccacttgcttctcttacgcgtctccttgacagttgacggccttgtgtgatcagcacgcggcaccttgtaggagcaccggccacggacgcggctggttcacctcatcgggttcacgccgtcgactgtgtgaaccctgctctccggagcatcgcgtcgaggtcgtgctcgtgtcgtgtcgatcatctgccacatcctgtagtagaatgtgaagaagttcttcacgaacgtgattcggtgcagtgttgtccgaagagctgttttcaggctacgaacatggctgttcgtagccgtgagaaaccgtgaggggctttcgtgagaaaccgtgagactttttcgagggtaggagggcgatgaagttctttgaactcgctgacgcgctccaccctctcgtgcccggaggtcttgctcgtgcaccgtatctgcgggaactgatctcgatgtttacgaccgtgaccgaagccgattgggcaacgcgtgctgatccttccacgttgcccagtgatgcgacgctggagcgaatggcttcgaccgacaaggctttcacgaagaagctcgccaaggcgattactgcccgctggggggtcaacaatttcgtcaccgtacttgatgatcttgagcttgaaactcagcagctgattactgacaacattgccgcctacggcgagcaggtacggctcgatcattttcctgaagatgttgcacgcctccttgttgagatcgttcacgaaaaggcgggcaccgataacgggaaggccaaagtgcttgccgagatcgctgtgcaagcagctcgggtgcgatacgaaaagcttctcctcgcacgctcacgcggatgtacgaactgtggcagaccgctgggaatctcatcccacggacagcaagccgactcgtatgcgatcgtcttcctcgactgtgaagaggacgaatactccgctgatgatttcgcggtcgtgtgtaagccttgcggggagaaatacgagctcagtcacacggcacaagatgtaaccaaattgcgccaatccaataaggcgctgtcattgagtgaccgggttgatgagggtcttgttccactcggcttggatcagaaaatcacgaagttgctcatcgcgatccataaccttccgattgaggatctcgccccgggcgtgacctatgacgtgatgccgatgcaagcgaaacttgatgatgtgaaacttgtgcggcgggtgcgtgaccacatgagcatttacgagtcggttgtgcgaaagaaagctaaagccctggaagaagccgggaaactcgattttgagcggatgcgggatgatatttggggtgcgtggcgtgttctggttgatgcagggctgagccaagatgaggtgtgggcacgcctgaccgagtggatcgaccagcacacgcaggttgatgaatacgcctgcggtgttgtggtgtcgttcctgacccagatctgtgaactgttcaagcctgggaggcagatactgtgatccgtctgccgaacaagctctaccgtttcaacgaatccgtgctcgctgacttcgtcacgattctcaaagccttagacgatgaaccgatctcggtgctggaactccaacgaatcctcgcacaagacctacacactgaagacctcatcgaggctctgacactgctactcacactcggcacccttgacattgatgtcagcaaaggagtgattcgtcgtgctcactagattatggtcacctgcgttcaagaaggacggcaaaccccgccctgtcatcgacctgcatgccgggttgaacatcgttgaaggcgcagacgaggcacaaaactccatcggcaagtccacgctgctacagatcatcgatttcgtttacgcaggaggcgacttcctcaaatccgacgcggtacttctcccgcaagccgtcggccaccacaccatctacttctcacttcacctgtctggcaaagatcaccatttcagtcgaacaaccgaccgacatggtttcgtcacccgctaccgcgacccgatgtggaagcaggcagaagaagaactcagcctctacgactaccagagctttcttcttgagcagtacgcgctgcagcagacgggtgggacatggcgtgaactcgtcggcagattcagccgttatgatgagcgagacatagcgttgctggatcggccgttggctgctgccgctggagcgagcgataccgacggagccaaagcgttactggagcttttcggtgcatacgacgagatcgagcaccttcagtctcgctacgaccaggtgaacaaagaagtctccacactcaacgccatggccaagggcaagtactccagctacatcaagctcactacgaagaaagaacgcgacacagctcagcgagaactccttgaagcgagaatcgaagctaaacaactgcgtacccacgccgacctagacttattccagaccgagcaaaaggcacgacaagaacaagcgctcaaacgtgcgcggatgcgtccgctggttcaagaactcgatgcaatcaatagtcgcctggccatcgtggaggccacgctttcgggccagacccgcatcaccacccgtgaccttgaagagttctacgaattctttcccaactctaaccgagagtctctcgaaacgatcgagtactaccaccaccagctcaccggtattcttgaagaacaactccacgaacagcaacgccactacctcgctcaggtcacaaaattgaaattggccatcgacaatttcaaagcgcagatcttggcgttgggtgaatcagtctcactcgatgatgaaacctacgaccaatccgcccgaatacaggcccgaatcgaccgcctcgatgagcaaatccgcaccttcgaccataacgaggaactcaaagctgaacgcaagaagctcaagcacgatattgccgaagttatcccaagactcctcggggaactgactgacacgatcaatgctcagatgaaaaccatcaacgatgcgctctacccgaacaagcatcgcaagagtccgctgttttcattcaaggcagcaacaaaaggtgtgtcctacagcttcgatcataacggcgatcgaggatcgggagccaaggccaagaacctcatagttttcgaccttgctgtgctcaccaccacgccgttgccgtttgtcattcacgactcagcaatcatcaaaccagtggccttcgcgccggtacgcgaactactcaacgtctacgcccacacttccgccttgactagcggagcgcacgaacccaaacaagtgttcttctccttcgacgccaccaaggcatacggtactggagcagaacacaccgttgcagaaaaccagatcattcacctcggcgaagacgccgaagcgctctacggattcacatggaataccgaggaagaaggagagcaaacaaagtgaccatcaccttcaaacccttatggaaactcctcatcgaccgcgacatgacccgcgaagacctacggcaccaaaccaggctatcaccagcgaccatcgccaagctcggacgtgatggtaacgtcaccaccgacgtgcttgcccgaatctgtaccgcacttgagtgcgatgttgccgacatttgtgccgcagttgcgctgaacgaggacggggtcaatgactaacagctttgacttcggccacgcgaacgcaggacaacgtaaagcaatcgaaacaaccataatgtcaaccaaacctacagcagaccctagcaaaggaagacacactcaagtcgaatggctcgaaaaacccagcccacaccaatacacgtcagcaacggttccgccctggccaagaatagtcttggcgcgttcaagccccaaacgatttgcccagggctctgataattacgtgatttactcgtcacaagttccattctgcccgaccaacaccagccaggcagttagaactctctcatttcaactggccctaataattgggagcaggtcatgaattgcagtagggaaagatgcccctgtatcaaagttacctatgcgtagcctctttgcgcatgaaacatctcagaataaaactgacaagatgtgaggagggtcttatgatcgccattcccaaccactcgtccgttatcaagtacgataatcttttcagcgtggcaaatcgtcgtgaaacggtgtgctacgagcaagatagtcaagttgtagtcaatttcatccaacgcttcgaacattgccttctctgataccgcatcgacagaagcagtaggttcgtccagaaccaaaagagcaggctttttatataaagcccgcgcagtagctaaacgctgccactgtccaatagataattgcctaccacctgcaaaacgtctgccaaggactgtgcttaatccttccggtaggatatctcccaaatgatcaagcgagaccattcttaaagagtgctcaacatcctcataatcgataaatgggtcgaattcctttcccgaaccgaaagctacattatcgcccagggaacgttcaaatttggcaaagtcttgaaagagagcagaaaaacaactatatagggactctctactatactgagctatatcgatgccgtttattaaaataactccactagaaggctcatagaaacgtagaagcaatttacatattgtggtcttaccagaaccattcaatccgacaatcgccgtagtggaacctgcatcaactttaaacgaaaccccgttgagaacgacctgttccgtccctgggtagataaaactaacatccctgaactctatctcaatgcccctagactctgttattgacaaagtttcatccgaaaattcgcgcgtaccctcaagaatcggagagggttccatctccatcacggctacccagttcgacacgtagaggagatgttgatatatacctgtcagacccagaaatgcagccaaaactaatccgttcatctgagacgaagctgaaatgaaaccagcgagttcgcctactcgtccatcgctggaagcaagaattgtggcaaaaataatcgaacccacatttgcgcaaactgaaattaaaccaagagatccagcctttgttaaattgaaccgaattagcaaagcatcctgcttcagaaagctactcctaagcttcgtatacttgtcctcaaacaattctgcaagacggaatactttaatttcttttcttgttgaatctgaggtgagtaaggctctaaagtatccagcaagtctggatttcggtgcccgtgcaaactcaatatcatacgcctttgtttgcagctgaaacgtggcgatagccgctggaataggagcaaccaaaagaaccaaagcaatccacaagttccaggccgcaatgacgctgacaataccacagatggaaattacagcctgaacagctgaacgagcagcatcaaacaaagaaaatatgtgttcgccagtattcgaatcaacacgctgaatagcatcataggttcgtgaactctcaaaatcttgcacctctagtgatcgaagcttacgaacgacatcaatgtcagtcttataggacagttttagtgtcaatttatcgcccgcatacttaagtaggttatcgagtgcataagcaccaacgagcgagaaagataactgtgcgagtgcccatatactactttggctaaaccctgtatttaaatcggcgatgttcgaaactaagctgcctatggctgccacttgaacagcaggaagtacgccccgtagcaaggtcatcgtaacaatagcgaataaagcgtaccgaccggtactatacaaaatagttatggctttcttaaaagaaacaccaaggggggccgcgcgcatcccagctgaaattgacaaaccctcaagttcgctcgcagtctcttccagattatccattcaaaaactccctcctccgaagtgcttgacgcattagccagtaacagctatcttcaaatgaaccacctgaagatcgaagccgattaatatgcatatgcaacagatcaagcaggatttgtgctacttgattacactgggttcgcatccagtttaggcgatgcccgtcggcttaagcattttttgcccccacccacggcctaagaacacgcgtaaacaaaagaaaaagtagcgtaatgcttaaaaagaaaacaacgtcaagaaaaactgaagcccacaattcctctccactatttaaatctacaatccgagcggctactcctctttggacaacaaatggaatcaaccgttcaacagcaggctgaagtaatattgaataaagaagtatagaaattgtcgataatactccattattaaacgcacggcctattgcacaacccaagacgctcactgcaagtgcttcaacaaaaacaacaactataattttaggattataaaaaagatccatattccctataattagcagctcaaaatatgcaatagcgacgttacctattccaaacaatccatgaactattagaggcacaatatcctcaaaaataattcctttattaagtactactctacgtatctccttgtcgaaattattacaattaactccagacatccaacacgaagatagaagtacaacataaaccagagagggcaaaagcgaagaaggagtagcagatatttttatcccatttatctctgcatcagcactagataacgacacaaaaaacggtactatgagcgcaggtaacgccaacgcaaaccagtttaaaggtaaagttacagttgctatcaagtagctccacaacgaacgcatcatcaccgacgccttcccacagcgagtgctatgtaccctaccaaggaaacagctatccacgataaaagtagcacgacggcaccgctaattgagtatggaccctcagcaggatcccaaaacgcgaaggacttaccaccaatcaaaggcagagaattatgaagaatagggattgactgaagaattcctgaaagggatataaagagcaataagacaaaaacgataaccgaaacaaatagacgacgtgttaacgcagtcacaaacaacgccagcacagagaaaagaatcgcaaaaaccgcaacacgggtgaatactataaacgctgacagaattgataaggaagcttcatcctttaaatcgagttgtagcacacaaacgacatagttcgcgatagcagcaacaaaagcggctccaacagcccaagatattccacatagaatcgtacctattcgccgcatgaggagagatctcgatactagtaaaacagattcatgttctccatgcgcatactccagattaaacaagtaagcagcagctattggaataaatatcaccgaagcttgatatacaggaccaaggtagccttccaaaagaaggtcagaaatgggtttctgagctagtgaagggtctaaatcatgtcctgaaagatctccagacaaaattgcattcattatctcgccatttattattgaaaaaacaatacttaatagcaacacaggaatcattgcaagaaatgcctcgcgcatagaccagaatctaataaattcagatcggatatcacgcatcagctcactctcctaaagccgactgattaatgcggaagtacgcttcttccaaagagctataggcaccatgtaactgatcttgacttaattgctctaccacagtaccttcacgaagaaatacaaatgatgtagctagctgttccagctcgttcatcaagtgactcgtaatcaaaacagtcttcccggcttccacaaattccttcaagagaattcttagccacagtattccttctgggtcaagaccattcaccggttcatcaagcaccaaaacatctgggtcagccaataatgcagcggctattcttaaccgctgtttcattcccaatgaaaaacctttgatgcgacgttttgacgccttagctaggccaacctgctcaagtgtattaaaacacgttccttttgggattcccttcgctgcggcaacccacaacaattggtcaattgctcttctcgacgggtgcggaatcattgtatctagcgaaacgccaacctcgtgctccaaggaaaaaatagaataaggttttccatcaaaatgagccgttccagaggttgctgattctagatttagcagaattcgcaaaagcgtagattttccggaaccattcggaccaactaggctgacgatggaaccgttgggcacatcaaatgagacatcacgcagcgcctgagtcgcaccaaaaaccttagaaacgctagtaaaactaatcatcgttcgctcctacagcacggctgatatgaaaatctgtacggttttttacgcatgacacgctttggcgtcacgcatcttcacgatactgccaccacaggagctgtgacaagagaaggtgccagattgattaagagtggaaaatttcacatccggcaaccctcgttgcgaaaatacccaaacatattacgtttctcatcagcgtcgcgcttcgaccacaagctcttgctgctcctaagagtatgcaaacactcgatattaattccacgttcttgagaggtaaaccagcactctgacgaagcgactccataggcactctagcgtgagttctaccacgtagttctagctacaccccactatctggggttagcagccaaaagctccttgtaacgcgcccttgcaaatatatctcgctttcgtccccatctcttagatatgtaacttcagcggccaaacgggtcgaagtactctacaaccgcacgcagatccactcttcccaacggtcactcaccactagaatacgaactaaagattacatctccacaactgggatcagcatgagctaccaacggattgcaaataaggctcaagccaacatctaatgaagcccgtaccttttagcgccagcaacactttttagcggctactcccaggcacgcacccactagctgaaatcagcctcaggcgcatcacctcggcgacccccgcagacgcatatagacaagcgagtaaaatccagaaacctgcgctgacaagccaaaccgcccctccgcgcaacataaaaataggacgctcactttgtatcaaaatgagcgtctaaatggtggagccgcggggaatcgaaccccggtccaactggtactcctgcattcttctccgtgcgcagtttgcctgagctttttctcagcctgaatctacttggcaaactagagattctataggctcagtcactgtaaagtgtcgctgcaatcccattgacgaaaactgcagccagtggctcctgaaaaacgacgccaggaaccgaggtagaagcaccctcggagctgacggacttttaaaggctctgcttaagcagctagagcgaagtcagtgcggttatgtttagcacttattgttttgtgaaggacgttagcgagatgacttcacattctcggcacgcttctctgcaaccaataccagctgtcgaaaccgatcgacccctattaagttgaaaaacaaccggcgcgaacgccatctacaattgtcgaaaatttttccccaatagtcaataggtgcggtaatacctcacattttcgaggccgatgatccccagctccacgagctcttcaataaaactctacacagtgcgccccaagaactgaatcaccgtctgtacctagctatgctttcgcgcttagcaaatatctacgtctcagcgctgctaatttccacagctagccacgatttttagctacttagcctaagatggagggtatggatatgcgcagcggtttatcagatccagacagtgggcagagtgagggcggcctgggagttctggagcgtccggaaactcgccggcaagagcccggggacaaagaccgttatgcgcattatgtttcggcgcaccgcctagcagcttcgcgcctgactggacagccagtagtcgccctttgcggcaaggtgtgggttcccacccgcgaggttcgtaatcacccaatatgcccgcgctgcgtagaaatcaagaaagaaatggatgcctccggcggtcccgactggccattccgcggtccgggaggatcccgctaaaaccttattgccaggtatcaccgcgtactgtccccagaaaacgccggctaacgattcctaaactatgagggcgcgaaggcctagtacacccaacctccaaggctcggtggtcttccgagcccgctactcagcaataaccggttagcgacggggctctggtttgctactaggagcctcgacttcgtcctcgcgctcagttaaatcaataatctcggtaggaattgccgcttcccctgccgaaagcctccagccggggtaggggagttcgttacgcgcctgcacatggtggtcctgagcatcttgcaaagcctgcttgccaacgtaacgtggattaggctgtccatcagtaaccaaatcaactagcagcggacgggcattgcggcgctcaaactcgacctcagcctgctgggcatcatcggccaccactaccaactctgcattagcgtatccgtcttcgccacgggcgcgccccgcaaacttgcgtccccctaaagtagatttagaggtcgaacgcttggcgacatcgtgaatcgagccatcttcattcacccgctgtaccagtttataaactaaagcggcagtgggaataccagaaccagtcaccatcttggtacccaccccgtaggaatccaccggagcggcaccgagagccgcaattgcgtattcgtccaggtcattcgtaaccgtaatcttggtgctttgggcatccaaggaatccagtagtgcccggactttgaaagcctcggccaccagatccccagaatccaagcgcacgcatcccagttcgccaccggcttcccgtgccagttttaccccgcgctcgactgcgcgggcaacatcataggtgtccaccagcaaagtggtgcctggccccaagctagccagttgcgcccggaaggcgtcctcttcagagtcgtgaatcaaagtgaaagagtgcgccgcggtaccgatagtgggaatcccgtagcgtttgccggcctccagacaagaagttcccctaaaaccagcgatataggaggcacgcgcggcagagactgcgctgcgttcgtgggtgcgtcgggcgcccatatccacacatggcctcccgtgagccgcgatagtcatccgcgaggccgcgctagcgaccgcacaatcgtgatttagaatcgacaataacagggtttccaataaaacgcattcggcaaaagtgccttctacctgcagtaggggagaggactcgaaatagcattccccctcggtgtaaccgcgaatattgcccttgaatttatagcttttcaggtaatccaggcagtcatcactaactattttttcccttgataggtagtcaatctcgtcagctgaaaattcgaaacgctccagggcttcgattacgcgggcattgccagccatcaccccgaaacgacgcgctgctggcagtcgtcgaccgaatagttcaaaaatggagccgcggttccaggtgccagatttcaaagcggcatccaccatggtcagctcgtacatatcggttaacaaagaagtggttactgaagaactcatgtttttagcatactcaaaaacggcttatattccagttttcgccttgcgggcgaaaacaaaaattctgggaagtaagtaaccgcgccaataaaatcatctttcaaaacagccccttgtcggcatcgtttttaataccctgaatatatggttaatcatctggcttctgacccgggtactcctgcgtattcgggcagtactcgcctgaagcaatggcgggttactatctctcgagatccggttaaccagccgcgctacgtggaacaagttttagccaaccagttttccatgtcctcagaagaagccaggcgcacccggcaagagatcttcaaccaggggaaaactgaggtagcggtgggtactcgcgaaagaatggaagccttagtgcaggcactgcacgcttatggtttgcgcgccaccttggatggaccggacgtaaaatgaacgctttccgtcccgtccccgggggatgggaatgcccaattggagaagttgagcgcgacctctttctaaaagcaatttcagaagtacgcaccctgttggatccaccggtattaccttttgaaatcaccactatgctcggggaggacgatagcgaggacgcggctaaagacatccatcttcagaatgcttcattagatcggctcttgcccccgggagcagctgacgagcgaaccgcccaaactatgcgggagttgactgattcgcagctacgtacccaaaaatccgaacgcttagaacggctataccaactactttccgagcagaccggttcggtgttgctgatcgaaagtggacaagaatgggattggctaggcggaataaacgatgtgcgtcttgccatatccggcaaactcagtcccgaagactacagcgttgatccccaagacaatagacaggtatcttcgcaggtaaacccgaaaaccggaaacgaaaaatttgaggaagccctagttacttccttctatgaatggctctctgggtggcaagattcactcttgcaggcgatagatagctggccgcagcctagctaggctgtttttgtgactaatgaatcggctatcggtattttcgactcgggagtcggagggctgacggtcgcgcgcgcagttttggatgtgttgccgcgcgaagaaatccgttatgtgggggatactgcccataccccttatggagaaaaagacctcgacaccgtgcgttacttttccctctcaatcatggactccctggtggagtcgggagtaaaaatgttggttatcgcctgcaacactgcctcctgtgcggtgctggatgaggcgcggcatcgctaccaggacgaacaggggattccggtagtagaagtagtacaaccggcagttgaacacgcggttacccgttctcgtaacggcaagatcggggttatcggcacccgagccacgattgaatccggcgtttatcagcgtaaactctctcgcatgggggcggagatttttactcaagcctgtccgcgtttcgtagagttcgcggaggaaggcatcaccgcctcccaggaactttttgacgttaccgaagaatatctaactcccctaaaagaggcgggagtagatactttagttctcggttgtactcactatccgctgctcgaagggccaatctcttatttcatgggagaaaacgtgtccctgatttcttcatcttcggcggcggcacgaaaagtctatggggaactggtggaagaaaaaatgttgcgcccgttcggggcggaaaaagcagagcaccactttatttgtaccgaagctaaagattctttcaccgccctggcctcccgaataatgggggcaaactttaccggaatcaaaaaggagagcattacttcatgaaagtgacagtggtaggggttaccggctctatgtccgggccggactccccagcttcctgctacctagtgcaggctgaaggaactgaccccctggggcttccccatacctattcggtggtttttgatttagggcccggatctttcgggcaactttggaactatacggatcccaccaagctagacgcggtagtgctttcacacctacacgctgaccactgctcagatatcgtgtctatgcaggtgcataggcgttggcacccacgcggcgccctcggccccatcccggtctacgcacccaagggagtcaaggaccgggtgcgaggcctagacggttttagtccccgcgatgactttagcggcgagttcgattttcatcatctaaagcagggacgagcttttagcgttggccccttgcagattaaacctttcgccgcctggcattcagttcccgcattttctttccgggtaaccggtcccggtaagaatggcgagacagtcttcacctactcgggtgattcggacgagtgcgatactttggtgcaagccgctgcgaactcggatctatttttctctgaatgcgggtttactaaggaggacgaggtgcgcgggatccatatgacgggggagcgcgccggccgggtagcccaaaatgcgggaaccaagaaactggtactcacccatattcaaccttggaccgaccccgacgtccccctacaggaagcgaaaaccacctggcggggagaactggaaatcgcccgctccgggatgagcttcgagatttagctttagtgttaggggcgtgcctgatcaggggtaacgttaccccctagctcgatagtggccgcgatcgcgggggcgagggcgcggaaggcttttcctcgatgagaaagggcgttcttttcttccgggcttaattccgcattagtgcgttcttgcccttcggctaggaaaatcggatcgtaaccaaagccaccatcgccacgcggggcatcaagcagctttccactcattttccctagacagtgccgttccaagccagccggtgaaaccagcaccgccgcacaaacgaaactggctccccggttttcttcgggaacgtcgcgcagttggtcaagtaataattgcaggttagcgcggtcatcaccatgatgtccgcaccagcgtgccgagaaaatcccgggcgcgcctcccataatgtctacgcataaccccgaatcatcggcaaccgtaggcagcccggttctttgtgccaccaaacgtgccttaatcagtgcattttcagtgaaactaaccccgtcctcgacaggttcttcgattcctaatccgcctgctcccacaatcatttccggggaaaaaccggcgattaagggagagaggatatcggctagttcttgcaccttatgagggttatgggtggccagaatcaagcgcgccccagatggtatcttcatgacagtgcctccgcctggatggcagaaatttcttggatcccttttccggccagatccagcagctcattcagctgggtgcgatcgaaagtctgtccctcggcggtgccttggatttctacaaacttgccggaaccggtcgccacaatattcatatcaacatcggcgcgcgaatcctcttcataaggcagatctagcagggcgtttccctccagaaaaccaaccgagactgcgcatagggaatccgaaagcacttttccgggccgtatccaccctttttcttgccccactttgatggcatctaccagggcaacataggcaccggtaatcgaagtagtgcgggtgccgccgtcagcgctaagtacatcacagtccagcacaatcgtgttttcccctagggcgctcatatctacgattgagcgcagggagcggccgattaaacgcgagatttcatgggtgcggcctccgatttttccccttaccgattcgcgccccgaacgggtagaggtggcgcggggcagcatcgcatactcggcagttacccatcccagaccggaatcttgccgccagcgcggtaccccttgggtcagggaagcattgcagagcacgcgggtatttccgcagtcaatcagcacggaaccttcggcctgctttgcccagcctcgggtaatttttaacggtcgcatctggtcaaaagcgcgtccatcggcgcgcacaaacttttcattactcacgttgccgattatatgatgaggcgctgctttaacggcatttaaatatttcaggcagctgctatcagtaaagctgcccgtagctttcctaaaaaatctgcgccaattttaacgctttatcaggaaaaatatggctcggatgatttgggtaaaaccgatagcagatgccgcaaagtcacaaagccgataggttagagattatggatactcccgcactttcgcgttgccgcatcgatctggatactgggtgtcgccagtttgtacacgtacccagtttattgcgggacggtgacacggaagtttttgcggtcgctgatcgccgccgggtgttactgccgcttaccaagggagttagtgcgggtcccgaaatggctgcttcacgttcccatgtagatgcccccgcaggaagcggacgtctttaccgcctaggcagcgcggaacgacaaatgttaggacaaattgagtcctgggacgagcgctaccaagcaggtaaagcctggtatctaggcagagatggcgctactagccgggttgccctgtttattagtgaccatgaactggcgggaatcgccgaacataccaccacctccctggggttaatcccgctgcgtcaagtaggggcgttcctcggaggtgaggatgcggctattgccacccatgcggcctgtctagctctgtggcatggcgacaccagctattgttcacgctgtgccacggcgctcaaggtgtctgctggcgggtgggaactgcactgcccgggatgctctaccattgtgtatccgcgccaagacccctcggttatcgtggctatctgcgacgagtcagaccgtttactattggcacacaacactgcttgggaaagtaacttttattccctgattgccggctacctggaaaccggggagtccctagaagcggcggttcaccgcgaaattgaggaagaagtcggactagaagtcgatgaagtgcgttacctgacctcccagccgtggccgtatccccgttcgctaatgctgggattttttgctcgctcgcgaaactcctattttatgttggatgaaaccgaaatcgaccgcgccatgtgggtaacgcgttccgaatttatgcagctagtggccggaaaagaaattagtccccccggaccggcaactattgccgccaatctgatcgaaaaatggctggggtatccgattgagcgtcccgaagaccataacttttaaggtaattgatgtggagcaggcagaagaactactaaaacatttagatcccgatcaggctagcgctgcccgggctttacgtggtccggtatgtatccgagctggggcaggtactggtaaaacccgagcaatcacctatcgcattgcctatggggtgcgcagcggcatctatacccctacctcggtattggcggttactttcaccgtgcgggcggcctcggaaatggcggctaggctgcgcgccctaggggtagagggggtacaggcgcgtaccttccactcggcagcattacgccagcttagatatttttggcctactgccatcggcggcgagttaccgaaaataatgaaaactaaatcttccctgataggagcggtagcttctcgtctagggttgcctcatgatcgggcagccctgcgtgactatgcggcagccatcgaaatggcggcggtgagcatggttgaccccgataactatggcaagtgggcaaagggcggaggtcagcaacccccggccgggatttccacctacgatatggctgatattatgcgcggatacgcggaagccaaacgggagcgttccgttatagatttcgaggatgtactcgctttgacctgcgggatgattgaggaacgcccagatattgctgggcagattcgctctcaatatcgcttcttcgtggtagacgagtatcaagatatttccccgctgcaaaaacacctgctagaactgtggttggggccgggaaatcgagatctttgcgtagtcggggacgcggcacaaaccatttattcttttgcgggagccagcccccagtatttaggtaacttcgccagcgaatatgccggtgctcaagtggtgactctttcccgagattatcgctctactccgcaaatagtttctttggcaaacgggattgttacccgcgataaagaaaccaagaagcaggcggtccggctcacttccatgcgtgaatctgggaaagcggtgcgttttgagcgctacccggatgacgaggcagaggcaagcgcgattgcaaaaatgattaaagaacgaatcgcaggcggcacccgccctagtgaaatcgcagtcctgtttcggactaacgcgcagtccagtcaatttgaggcagctttggcacatttggacgtgaaatattgcgtgcgcggagcagaagggttctttaaacttcccgaagttgctgctgtcttgcggcaagctggcgcgctggcgcagcggggagccaaaggagatatcggggaaatcatctcggagctggcacgtcctttgggctggtcagtgaaagctccagctacccaaggcgcgatcctagaacgttgggaatctctaaataccctggtggaacaggcgcagttgaagcaggcggccggatggtctttgagttcgttagtgcgcgaatggcaagagctggctgaggcgcaactagacccctcgggtgggggagttaccttggcttctattcattccgccaagggcttggaatggaaaatagttttcttggcgggagttagcgaagggttattgcctatcgcccaggcgaaatcccctaaagagctggcagaagaacgccgcctagcctatgtggcagtcacccgtgcccgtgatgaactggttgttagctacggggtaaaacgctccctagaccgcaaagccacccgtgcctgctcgcggttcttctctccggtttggccccgaaagactaaggccgtgaaaactacgcgcacccccagcgcgcgcggggaaactaagcgtttcttacttgcagctagtgaggaagaacaagaactttttgagcacctgcggcactggcgactagaagtagctaacgggctggataaaccggcctataccgtgttttccgatactgctttgcgggatatcgccaccgtagctcccaaaaacctcaagcaactttcactgcttagaggaatcgggccggtcaaactagaaaagttcggggcagcgattttgaaaatcattggaggggcggatccggtgcaggtagctggcgagaacctgaaggttttagagaattagacgttcacgcagccacattttggatgtggctgccattggcgcacctgtggcagaggatcggcaggattgaaaacccaagaggctcccaccagcgagactggcaggcctgataggtagcttaaaacctctcggacggcaaaagcactggcatattcggacagagaagtatctgccattaccggatcggcgcacgctagttgggcagcgagctgcggccactccggatccgcgtcgcgcttcgctaaatgttgacagtgcagacataaggtacgtcctggaacgaacagggggccgacctcgatctcggtttcccgtttgataatcggcagatggggtagtcccttcttgatgcaggctttcgcccacgccgggttggtcaggtaggaacagatcgctatttccaaagtaactggtcggttgggcagttgcttatttactcctagcaccaagggtgcgacatcttggcgaaccgcacccaagtgctcatcgctatagacgcacaggtcgcgggtttttacctgttcctgatcgcgcaaaatcaaagacgtgagcccgcaggcgattaacttccgggttagcgtgattcccaaagaacccaatccgctgactccgatgagtgcctctttccgggctttaatcggggcatctgagccgtagaggtgataggcgcaggcagaatccccgtccggcacctgatgcttcgcggtcagacctccatcggaaagcatttttaggatatcgctaacttctttcttattttcggggaagcggcgctctaggtgagagttgtaccagttttgtttgtcaaatatccatttcaggatggctatatgggagggagtaagtccttttaccaggaatccattgcgttccccggtaccgaattgggctttcccgcccgagcgcagcaacattactgaaccgtttattaatcgcataaaaataagcatcccagggtgccgctttcgaaactagagcgactctaaaagtgtggataacctattttaaaaatctatttacctgctacctctttaggtaatcgtttccattaggactcgtccgaagagggtgaatctggggcgctgtcctcaggaggagtttccccgtcctcactatggtcgtgggggtggggattgcccatcatttgatcaccttgagaatcaacttccggggttagtccttgcgcccaacctaaagttccggaaagcaaagaatctagatcctggtctacctggtctttctctggttctttgctgctttcagccacaaagttttcggggtcagttaagtcttgcaaagttggaatcatatccgggtgtgaccagagttggtcacgtttttgcattccctgctcgctgagcagcgcggaccaaagattagcggcctggcgagaatacttggggctaagttccattccgatcagtggttttagcaccttctcgattggggaagtagtagcccggcgccgccgcattaactcgcgcaactggattacatgctccaagttaggcatacacgcccgagtggaaacttcatcaacccagccttcaatcaacgccaatacggtttgcaaatcttccatcgcttgccgttgggtgtcagtttcttcagccgcgaaaatatcggcgggtattccaatccccaggttggaggggtcgaagtttccaagcgggaaaccaatcgcgccttcgccctccccaaattgttcttggaggcggtcttgtaaatctctgaccgaacgatcaatcgcctccccgtcgacccgaatttcttgcgcatagcggccaataagctgcgataacttatggcgcagccaaggtaccgaatggaaaaggcgggcatgagcggcctcgcgtaccgcgatatattgactgacctcggattcagtaatatctaaatccttagcaaaggcggcgatatttaccggcaccaaccccatgattttttcttttgccaaaggaatcccgatgtcggtagaaccaaaagcagcttgcgctatttgccccatagcctgcccaatctggactgcaaaaagtccggcagccaggtttttcagtaaagaatctggatccatagggccgagaatctgcccgactcccggaatggccgctgaagccttcatttcttcgcggtcaatgccttggcgctctagttgctccccgatagcctcggtaaatgctcgcactacgttagtgatgaccggctcggtaaggcgctgccatgccggcaaagtcgcctgtatccattctttaggcgtccaggccactcgggtggtgacggtgggactcaaagtggtaaccgcatctaaccataaatccgccaccgaaagctgttcgcgaatcctttgcgcttgggcagcgctggtgggggcgctactggggaggcgggaagaagccacttccgtggctgcctgccagttaacggcgccctcgtggggagcgaagaaatgttttagctggctggcagcattggaaccgccagcagagaacgggagcggaatcgtgcctcccgtcagtttttcggggtcgataccgtgctcttgtaactggcgataggcgtcctcagcagcctcttctcctagcatctgtttaagcattttgaaccattccggtcgctgctcaccgccgctatgctcctccaagtgctgcacaccccctaaaaattgactactgtctttaagagtatcggtattgctggctaaggactaggtagcagtgctagtttcgccttgggcggagcataattgagacctaaagaaggagggatcgtggccgggaaacagtcgaaaaaagctcgccgacaggggagaatcggtaaagccatgatgaccttgtcattggtcggtttcctggttcttggttttgccattcgcgcacccttcgtaatcgaatccccaggtcccaccttcgatgttctcggctcccagtctgggcaggggcgaattattaaagttgagggcgcgaaaacctatcccactgaagggcagctgcggatggtaacggtttcgatgcgaggcggaccaggaacccacgtaagttacgcggaagtgttgctggcgaaaatgcgttctttcaccgaggttttacccgaatcttcggtttatccggaaggtgctactgaaaaacaggtggagcaggtttcacaagcgcagatggaggattcgcagctcagcgccaaagtggcggcgcttagcgaacttggatacaagattccggcaaagttcaaagtcactggaatagccgaggattccgatttcgcgggcaaactgaaggaaaacgatattctgcggacggttacctcccggggggaaacccaggatttagagctcgccaactcactttttgatgttttagagcagaccccgccgggaacttcactgaccttcagcgtccagcggaaggataaaaacatctcggttactgggaaaactcgcaaacctagcgatggccgccaaggatcccaactgggaattttcctgaatccccaggccaaactaccggtggatatcaatatcgctttgcaggaagtggggggaccatcggcgggaaccatgtttgcgctcgggattgttgaccgcatgagcgcggactctttgaccggtggaaaagagatagcgggaaccggcgcgatttcctatgggggacaggtgctggcgatttcggggatcccccaaaagatggcgggtgccaagaaagatggcgcccagtggtttttaatgccgaaagcgaattgcccgcaggtgaaaccgattaaaggaatccgggcggttccggtacaagatctgcatcaggcacgccaggtcgcctcgcaaattgctgctaatcagcgtcagaaactcccgcgctgtccggctcgctagccagctgggctagttcctcgtcactaaccagcatggcttttagcgcctctaggagttccggaacaatattttccccttgcgccaccatctcgtcgctatcttcggcgcgggcgcgactcgcacaccaggtgtttccatcgcgggtagcgccggctacaatccgtacgtcttggcgagagggatgggcaagtaagaacttttcgcgctcccgcggatccgcaggggcatcggcatccgcttgcggggaaaccaggaaacgttccatagagaccgcgactcccgccacgtcctcaccgaaaactagatgccccagagtgtccattaaatctgcaggaggaaggtggtcttggaggactgcggtcaggtgtaggggattttcagctagggccgcgcgtagctgatctgcctcgatcggatccatctcacccgctagctgcgggaaaatcgacttggtatagacaaaggcaaaaagactcggggaacggtcccatcccagctgagctacgtctttttctaaagaggaaaccgctaggcgcagtgacagccccgcgtcagatagatccggtgaagtagtcatggtgttatgttgccatcttctacagcgtggcggctagttacgctttccggggtgagtaaaaaccctaaacgtgaaagaatgcgtacaggcagatatcgagaaaaacccggaggggctcgtgagtaacgatttatttggaaatcttggcttcggcggcggtaaaggcggtggtttccgtggctttcctggcggatttggagccggcagaggtggcggaaacagtagcggcggttcccagggagccggaggcggcggacgtgcgcccttgccgcaaataaagtttaagaaacccgggccactcggtatcgctattggcgtaatcgtcgcgctagttgttttactgctggtggcttcgcaggtgtggacggagattctctggtattgccagaccgggtatttgcgggtactgctcacccagtggattgctgccggaggcatgttcttggcatcgttcttgattgcttgggcgattgtggcactcaacttgcagattgcctatcgtaatcgccccgagatggggaccattgccgcctctattaggtcttatcggtctactcttacccgtcatcgtcggggaatcttcttggggattcccgccctaatcgctatattcctggcaacggggatggcggctagttggcggcaagtgctggtggcgttcaccggtggttccttcgggaaaaaagatccccaatttgggtttgatgtttctttcttcgttttccgtctgccgctaatcgatatggcggtaactttcctgctcactttgttagggatttccctagttgcctgtttgattgcctactacctattggggtcaatgacggtaactcccaaggcgaaagctactaagcctgcgcgtatccatatggggatcctgctggcgatttcttcggtgatggtcggcgtgacctatttcgttgatcgctggaccatggtttatgggcaaaactcgccaactgatggcgccatgtacaccgatgtgcacgcgattattccggctcgcacgattttggcggttattgccctaattgtggcggcgctatttgtattcgcgtcctttagaggcggctggtacctgccggcagcgggtatcgcggtaaccgtggtatctgccctagttattggggcaggctatccgtttattattcagcagttccgggtacgccccaacgagagggaactggaaagtcaatatattgaccgcaatatcaaggccactttggatgccttcggcatgaaggatctggacctgatttcctatgatcaggtcaccaatgaaactagcgccaatcagttgcgtaaggacgcggactccacccagcagattcggcttttagatccggagattatttccccggcagttcggcagatgaagcagtcgcgtccttactattctttcccggatcagttcgcggttgaccgctataacttcccggataaggacggaaagatggaaaagcgggacaccgtgattgcggtgcgtgatattaacctggatggtttggctaattcccagcgtaactgggttaatgaccacacggtgtacacgcacggtttcggggtggttgccgcctacggtaaccaagtaacttccgaggggttgccttcctattgggaatcttccctctcggctaaagaatatggtgaaatcggggattacgagaagcgaatctacttctcgcaggcctctccgttgtattccatcgtgggagcccctaaaggcgcggatcctaaagagctggattaccaagacgccaagaataaccagcaggtttacaccacttttgatggtaatggtggcccccaggtcgggaacttcttaaacaaggtactgtttgccttgaagttccgctctactgatctgttcttctcagatcaaatcaaccctaagtctcagattctttatgatcgtgatccagcgttgcgggtagcgaaagtcgccccctatttaactttggattcgcgtgtctatcccgcgattgtaaatatggatgccaagaagggtgcgaagaaacggttggtgtggatcgttgatgcctacaccaccactgattcctatccttattcccagcatcttaacctcacggatgcgactgcagatacggctactgccaaaaccgcgcagttcgcggtgcaaaataacgtgaactatatgcgcaactcggttaaggccgtagttgacgcctatgacggttcggtgcagctgtatcagtgggataaacaggatccggttctgaaggcttggcaaaagatttatcccggccagataaagcccatgtctgagatcagtggggatttgatgagtcacttgcgttacccggaggattacttcaaggctcagcgtgcactattggctaactaccacgtcactaacccttcggagttctacaccggtggtgaccagtggaaactctcagaagaccccactgccacttcgcgtgacctggaaggatcgggcaaactgcagccgccctattacctgaccatgaatatgcctaccggcaagaacaccgatcaaggcagcgccgaattctctttgacttcagtgtttattcctggcggtgaaggtcggcgcgcggccatggccggcttcctagcggttgactctgaaaccggtaatgagaaaggtaaagttcgcaaaggctacggcaagatgcgacttttggctttgccatcggataccactgtgcccggccccggtcaggtgcaaaacacgtttaactctgacccggaagttaaccgggagctgaacctgcaagatcaacagggatcccgggttatccgtggcaacctgctgactttgccagtaggtggcggtctgctctatgtgcagccggtgtatgtacaatccaccggtactacccagtatccgcagcttagaagtgtattggttggcttcggcgataaggttgggttcgcgcctacccttaaagaagccctggatcaggtattcgggggagattccggggcggttactgcctccaatgacggcaataagaaggctccggctgctaaaggtaaagcgggagaaccttccgctaaagcccccagcgcgcaagagaagctaaacaccgctctgcaggacgccaagaaagcgatggcagatgcggacagtgccatgaaggcgggcgactgggcgaagtacggcgaagcccaaaagtccctggatgacgcgatttcgcgggcggtttctgctcaggacgagggcgctaaggcagccaaataactgcaagtagcacgaaagtgccatagttagggggctaggtcgccaggtaaaactggcagcctagccctttagcttttgtctaaaccgggattaacttagcgctttacttattcctaaaccaggatcttgaagatctgggaggaaggatcgatttcctgcacctgcaggggagaggccgccatccggcgccgcagccccttaatatcggtgggatccggcagttcaatccccaccagtgctggtccggtatcgcggttatttttcttggtgtactggaagtaaatgatgtcttcaccttcgctgagcacgtcatttaaaaatgcccgtaaagcccccggctcctgattgaaggtcaccaggaagtagtggcgtaaaccttcgtaacgcccagaacgctcggttacctctgcgtagcgcgagaggtcattattgccgccagagaccaggcagaccactgagccgttgggaatttgcggtaagaagctacgcgccgccgcagaagctagcgctccggccggctccgcaatcaccccttcggaatggtaaaggtcgagcatttcggtacaaaccgcaccctcaggcaccaccaccaggtcatcgaccagttcccgcacaatctgataggttaaatccccggccctgcctacagcggtaccatctacgaaagagtctacgtgttctaaggaaaccggattccccgcctgaaccgccgctttcatcgaggccgcgccttcagattccacccctacaatccggataccggggcgatgggctttcagccaagtggccattccggcaatcaaaccgccgcctcccactggaatcaaaatcatatcggtatcatccggcagctgggaatctaaatccaccgcaatactgccttgaccagcaattgtgtagggatcatcgtaggggtgcacataaaccttgcccccgtccttagcggcctcggcggccacccgattagcttcatcgaagtcgccgcctacaattaccggttctacccatttaccgccgatagtggcgatccgtttgcgcttttgccggggagtggaggccggtaagaaaatcgtgccgtgtattcccaggtgtgcgcaggcataggcaactccttgggcatggttacccgccgatgcacacaccaccccggcctcgcgttcttcttcatccatggctgccatccgcacataggcgccgcgcactttaaacgagcggcaaatctgcagatcttcgcgcttgagataaactggacggcctacttctgcgctcaaacgatcgctcttttgcagcggagttttggtagctaccttggctaataccccggcagccacctctatatccttcgcggtaactgtgctcattgttcctccaaaaaatcgatagttaataacctatcgagaattggcttgcgggtgcttttgcttttcgctatctggcatccaaagccgatggactaggctaaaggtatgacaaataatctgaaagatcctttagtgtggatcgattgcgaaatgaccggcctggatttagagcaggattgcctggtagaggtggcggtgatcatcactgacgggcaaaccaatattgtggatgaaggtatcgacctgctgattaaacccaaagcgggcgccttagaaaatataggggattttgtgcgcgaaatgcacaccaagtccggtttgctggaggaactggaatctccggcggcgctagagctggaggaggccgaaaaacaggttttggaatatattaagcgttttgtgcctggtcagggacaggcgctgctggccggcaattcggtagggactgataaacagttcctggaaaaagaaatgccgcaggtaatctcgcatttgcattaccgcttagtggatgtttcttcggtgaaagagttggcgaagcgttggtatccgcgcgccttttataacgccccagaaaagcatgggggacaccgcgccctcgccgatattcgcgaatctatccaggagctgcgctactaccgcaaggtactttggccggcaggggaagggccgagcagtgaggaatgcgaggcggccgcgaaagaggttttagcgcaagggctgggagcctagctggtttcgggacgaaaaatctcggatcatctacggcctaaagttttagaaatcggggatttagctgccacaaatttcgcaggtaaacggatttacctgcggtttggcgcccccgacaggaatcgaacctgcaacctcgggattagaaggcccttgctctatcctttgagctacgggggctggttgttcctcaagtttagctggaaatctcccgcgtcctaattccttgtcctcagaggtagataatcacgctttttcctggtggcgcagatttattttttaaaaatctcaaagccgatttgcatcatggtgaggtaatcaacaccaggaggaatcatgagcaaagccaatattgaggttacctttaccggctgggtagcgaccgcacccacctttcaccgtcccgatcccgcgaaacccgaaaaggcgcttagcacttttcgggtgatgcataccccgtactctcgcgatagccaggggaactggcagaaaggggagtcattgacggtccgggtaaaagtttgggggtggggcgcgcactatgtgtcccgctccattcgggtgggggatccgattattgcgagcgggcggttgatccgttctaaatggcaggacaaagagcaggttacccactacgggctagagctaaccgcatcttctttggggcatgacctgaccatgggggaatctaactttgtgcgaatggtaggtgcgctccctaaacggggaaattttgcttcccctggcaaagaaggtagcggttcgctggccgatcccgagggcgagttcgagacttccccgggaacagaaccggcagggaaacaagctgcggagggccaggcagctgcagaaacggtagatcctgacaccggggaaatcatcgcttcgggggcaaaaactgcttccgggaacaatccgcctgcgtcctcggaagcaagcaccgcggaaagcgccctcgacccggaaggggagtatattttagaaactaccttcagcggagaggctgcctagtcgccacctagtcgccacctagtcgcgcgggggttcgctttgcgtttttaactccactattctgggtattagaaacaatacccgtctggcagaaagtggcagcagtggcagaattcatttaccaaatgatccgcacccgtaaagctctaggtgacaaggtcattttggacgatgtaactatggctttccttccgggagccaaaatcggcatggtcggccctaacggagccggtaaatcctcgatcctcaaaattatggcgggtctagatgagccctccaatggggaggcgcggcttacccccggctataccgtcggcatcttgatgcaagagccagaattggacgatgatctcacggttaaagaaaacgtggagcaaggtgtcggccccctaaaggccaaacttgatcgcttcaacgagatctctgcgcaaatggcggatccggatgccgacttcgatgccctcatggaggaaatgggtactctgcaggcagagattgatgccgccgatggctgggatgtggattctcaactggagcaggcgatggatgccttgcgttgcccgcctccggaaactccggtttcggtgctttctggtggggagcgccgccgggtcgccctctgccagctgctgctaaaagcacctgacctgctgttactggatgagcctactaaccatctggatgcggaatctatcctgtggctagaaaagcatctgcactcctataagggggcagttatcgctattacccacgaccgttatttcttggatcacgtggcggaatggattgcggaagttgatcgcgggcgtctttatccttatgagggtaactattccacctacctggaaaagaagcaggaacgcctggaagtccagggacgcaaggatgcgaaactagctaagcgtctaaaagaggaactgcagtgggtgcgttcttcagctaaggggcgccaagcgaaatctaaggcacgtttgcagcgctacgaggaaatgcaggcagaagccaaacacgccaagaaactggactttgaagaaatccagattccgcccggtccccgcctaggaaccgtggttttgcgtgccgataaactctgtaaagggtttggggatcgcgaactgatcaaggatctgtccttcaatctgccacccaacggaatcgtaggaattatcggtccgaacggggtcggaaaaaccactttgttcaagacgattgtggggctcgaggaactcgattccggaactctcgatattggggagaccgtaaaagtcagttatgtggatcagaaccgtgccgggattgatcccgataagaccttgtgggaagtagtttcggacggtctggacttcttggacgtggggggcgtgactattccttcgcgcgcttatgtggcctcgtttggttttaaaggcccggatcagcaaaaacctgccggggtgctttctggtggggagcgtaaccgtttgaacctggcgcttaccctcaagcagggcggaaacctgctgctgctggacgagcccactaacgacctggatgtggaaactttagccagcctggaaaatgcgctcctggagttcccgggttgtgcagtggtaatcacgcacgaccgctggttcctcgaccgggtcgccacccatattctggcgtgggaaggaaccgaagaaaaccccgcgaactggtactggttcgagggcaacttcgagtcctatgaaaagaataaggttgaccgcctgggggcggaggctgcgcgtccgcatcgggtaactcaccgccgtttacgccgcgcctaacggatgtaaaatagctgataaacaaggttacaagggctggggtaacaaatgagcgatagtcaagaggatcttaaagaactggcgaacgcctacggaattgcgattgattactgggactattccggggttcaccgcatagtttccgatgaaactctgcgcgcagtcctcaaggcgatggatattgacgcggatacgcctgcgcaggtggcggcctcgctaaaaatggttgaggagcgtccttggcggcgcgtcctccccgaatgtgtggttacccgcaacgatgacaactattgggtgcgggtacacgttccgcacggtaaagcggtaaccgtaaccatgcattttgaggagggcgggtcttgggatttgccccagttggatgtgttagtggctccccgcgaaatcaatggggtgctcaccggggaagctactttcaatattcctcccgggcagcctttgggttggcatcgtttaaccgcccaggtagaaggggatgaacgcccctatacttgcccagtagcggtcactccggcgcgtctgggaatgccgaatttgcgtgatgggcgtgcctggggagtaatgagccagttctatgccaacccttcccggaattcttgggggatcggggacgcggcagatttggcgaagatctgtaaatgggtggcctccaagggcgcggatttcttgctgattaacccggtgcatgcttcccaggtgacttcgcccctagaaaactctccctatttgccttgttcgcgtcgcttttggaatccgatttatattcgccccgatgcgattgttgaagctaaggaactcccgaagaagaagcgggaaaagctggcggagctgcggcgtaaagcccaacgctcccttagtgaagcgatgcccgccgatcatcccggagtttgcggagccggagctcacttctttagtggcgatttagtcaaacgcgaccccgtctggaaacggaaactgcgcgccctagagattatttaccaggttccacgctcgcaggaacgagaagccgactatcagcagttcctcaccgaacagggcgcggctctggaacagtttgcaacctggtgtgctttgaccgaaaaatatggtttagagctgcctgagaagtggcaacgtccagatgcttcccaatttgaaaaatgtggggagaagttacgaaagcgagccgaattctttaaatggttgcaatggctttgctaccggcagctacggcaggcgcaccaagtggccgtcgattccggaatgaagatcggggtcatgcacgacttggcggtaggggttcaccatttgggtgctgaccattggaccgacccggcggtctacgcgcagggcatctcggtgggtgctcctgccgatatgtataaccagttggggcagaactggtcgcagccaccttggcgcccagaccgcctagaacagcaggcctatgaacctttacgacgcacggtcgaggcggccgccaaaatggggggcgcgctgcgtatcgaccatattatggggctgttgcgcctgtggtggattcccgaagggatgctcccgaaagatggcacctacgtgcgctataaccatcaagcgatggtgggggtactgctgcttgaggcttaccgaaataatctggtggtagtcggcgaagatttgggtaccgtagagccttgggtgcgcgactacctgcgctaccgggggattttaggtaccggggtgctgttctttgagttcgatgctccggaccatttggtaccgcccgcggattatcggcgagagcaattggcggcggtcaatacccacgatatgccgccagtggcgggctaccttaccggcgaagacttgcgggttagggaatctttggatcttttggattcttcgcgcgcagaggctgaagccaaccaggagcgagtttttggggcggtacgccgcgcgctgattgaacacgcgggtctggcggaagatgagaccgatatgggcgagatgattcgcgccctctaccgttatatcgccgctacccccgcgcagctggtggtcttgaccttggcggatgcagtgcaagaacagctaaccgaaaatcagcccggtaccgagtatgaatacccgaactggtgcgtaccgttgcgtgaccaagaggggaaaactaggttcttagaggacgttaccgctgatcagttcgctaatcagcttttggagatgctagagagcgcagtgcatcctaactagggctgcgtctgcacgctcgcaagccgctgttaggacgaggtttcgccgccgaggtagggcagtagcccctctagactatcgcttactaggtcggctcccgcgctttgcagtacttcgcggctttgactggtggtaaccgcatagattctgccggctccggcctcgcgcgccgagataactccgctggtagtgtcttcgatgacgatgcaggaggacgcgggcagcttcagggttttcgctcccactaggtagggttccgggtcgggtttgccggcactaatatcttcttggctaatcactttcaggctggccggggctttgagtagctgggcggctaactgcgcccactgcctccaggcggaagtaactaaacattttggcatctcaagttgcatgatttcgcgggcgccagtaaaaatccgtgggggatcgcgccgggtatcaacgtaggagcgagcctccaggccgagagcttccgggtcgaggccgttccaagggccgggttcgctttggaacacttccgggccagggcgccccttgaaaatctccatttcttcctctgctattcgccatcctttcgccgcaaacatgcgccgataggcggccaggtgagtgtgttcagagtcgatcagggtgccgtccaggtcgagtagtaaccctttcaaagagccgtaagttttccgctcatcaatgtttacgctgttggtgttgatatctgcgctcatattgggatttatggtgtgcctgctttctaatgtgcgccctcggcgtcggcgagcgcgtcctagtgtccggtcgcgctattcatctgggcattaaaaacttaaaggagcgccctcgaaaaggaagcccggcgttttagcgcagtttttcaatttcggcagccagttcatctgccacgggacctaccaccacttgaatacagcgaccggttttcaccacgcctagggctccaccagcagctaatacttcctcatctatctgctgtgggtcttttacatctacccgcaggcgggtgatgcacggttcaatctcggtaatgttttcggtgccacctagccctgccagcagctgttttgccttttccatgagtttctccctgcatctaaacctttaagaatgtgcctgttcaatagtgagattaccatcaatctacaagtagcttagagggaatctagatgagcattgctctgacctgtactaacgataaatatgtgtctagtggattttcggtaacaatgatacgattgttaagtaaaagtcatgagtaacagcaagttatgggaaggtcctatgcttaacttcaataatcaacctggcaccttgtcagcagagaaatcaggtggcgcgattcagcagtctgccagtttccttaagaggctgctgatcgtcaccctattttgtgccttgagcttcatgctctcagcgccttccttggtgcaggccgaggatttgcaggaggggacgccggcggagcaaccaagcactaatgtgcagccagtaaacaccgcagaccctgccaagcttataaccagtgcagcaccggaaaacaaggcgcctgccaaagcgaatacccaggcggacgatggcctggagatcggaccggagaatattgggcaacccgtgggtgctgccgcaaaaccgaaggtcaatcctgtatttgctggaaataaaactgtttctggatcattaactatcggagccggacaacggaagtcaaaaaagctagatgtgactattcacgtgaccgtgagtcgtcaagcaggtggaaccgaagaaaaaacggtcactattccatacacggacaaaagtcaggactggacggttaatttaggtagtgagcttgcggagggcgataaagtcactgtaaagcaagagtataataacgaaatttctgaagctgtcgttctggaagttaagaaatctttagcggatcagcataaagatgagttaaaaatgccatccggagaaatctggattgaacacacgaactccaaccagataaataacgatgagcaagcagaagctgttcaaatgttaaaagatgcaaacactgcaatagctggtgatattaaatcagttaagttttctattgatggcacggaacatgcatactatgaagtgacctataccgatggatcaacctccggaaaaattgaagctccggacctaaaaatcaaaacggtaacggaaacatctgctgctccgacaatagaaaaagtacaggtaacagacggacagattatcgttacatttgctaacgcggttgccgcaggtacgaaatttcaatttgtcaaagaatttagggatggagaggacaggaatttttccccaaagggaagctgtatagtggacaaatctgactcaaaagagatgtctcaagcagtaatcgttaacggcacaacagttactttcccaattacggataaggttaacgatttaaaactcggaacagagttcggtatcattgtcaaagagccacataaattccgttcttgcgcgaagtctgagccggtaataacaacccccgacaaagtcgccgtgagagatcctcacaaattaacggatgcggataaaaaagccatcgataaagctattcgagatgccaatacggtaaatggcgtatctaaactccccgatggaactggatatttaaccgatcctgcgtttatcgagtttgataaagatggaaacgttacaataatcagtcctaatgatgtggaagttgattgggataatgccggcaatccgatatatcaaaaaaatgccgatggaacctataaagtaaacaatggagccaaagtcactaaattcccggcgaaagatctagtgaaaaatattgcccctgaatctccggcgattgcggtagatacggataagggtgaagtaaccattaccccaccggcttataaagatcccggtgatgataccgacttggcgtcttacaccgtcagttataaggatgctgatggtaaggataaaaccataaccgcaacgcgagatttgaaaaccaataaatggagcggatcgggtgttgatgagaacaccggtgtgattactctgaaagttggagacatcgaagttggtggaaccatcacggcaaaagcgaaagacaaaggcggtcttgagggtgatactgaagagcttgaatcagctccggccagtgagacgcttgaaacggttgaggtaacctacgatgcgggcggcggtaggggaaccatgaccgatgggaaactcaaggacggtaagaagctgaataagggctcaaagtacacgattttggataatgctttcactgctcctgatgacacccaagagtttaaagcctgggaagttgacggcaaagaggtacctgcgggtaccgagatcaccgttaaagccaacacggtcgtaaaggccgtttggaagaaaatccaggtgaaagtgacctatgacggtaacggcggcgaaggaaacatggaaggtaagaccctagacaagggcagcaagtataccttggccgctaacggcttcaccgccccggagaaccaagagtttaagacttgggagattgatgggaaagaggtagcccctgataccgaaatcacggtcaacaaaaacaccacggtgaaagccgtctggaaagacatcatggttgatatcaactttgaaccaggtgaaggcggctccggcaccatggacaaggagaccgtcaagaaaggtagcacttttaagttgcctcctagcaagttcaaggcgcctaagaatatggagttcaaaggctggaagataggtgatgaggaaaaggctgtcggtgacgagatcaccgtcaacgataacaccactgtcaccgccatctggaagaagatcccggttaccgttacttacgacggaaacggtggcaaaggaactatgaaagaaagtaagaccctatacaagggggatacctacaaggtgcttgcttctacgttcactgccccggagaaccaagagttcgatacctgggaaattgacggcgaaaaagttgcagcggataccgagatcactctcaccaaagacaccgtggtgaaagctatctggaaagacatcatggttgacgtcaactttgaaccaggtgaaggctccggcaatatggacaagaagtctgtaaagaaaggtagcactttcaaactgcctgctagcacgttcaaggcccctaaggataaggagttgaaaggctggaagataggtgataaggaataccaggtcggtgacgaaatcaccgtcgaaggtaacactactatcaccgccatctggaaggacaagccagcttcttcctcgactactccgggtaatcaaaagcctggtaaccaggcgaagccacagaaacagcacccgagtgcagctggggagctgtcaaggacgggggctaatgggatgtattccgtgtattccgcaatgattatgctggcagccggcagtctgttcgtgattagccgccggcggcgcgctcagcgctaatctcagcgaaacaccataactaaataactaaaagccgctcataagcaaaccgcttatgagcggtttttagtttccctaacctgcagacgcgaacccaccccaaaatgcgcactttcaaactttcgccttctgctgcgccctcgccctcgatcctgcgactttcctacgtcaacagctctacctcaggggttgggggatatgcagggctgcggttagaacctttcatattttacgttctacccgcggtatcgacacgctgaaaaaagtatttattattttattatcgctggtcaaaccctaaacttgctacaaattttcgggaatttttaaaaaacgctcgcttaaaaagtattcatagtgtatagtgattcctgaatccagatggatgaccacgctttgagcgtaatgtccttcgacaggtctccaggcaaccggatcaatcgtaagtcggtgccctcgaaggaagattcgccctctcgggaatgccgggttgggaacaacgatttttaggaggccatcatggctcttgatactaataacactgtaactgaggttctcgcgcgcgctgctgcctttcgcgatccgcttcctgccgaggctcccactcaggcgcctactccggtagaagccccagcggaggaatctccgcttgctgatccctgggaaatggaacgcaccggtatccagtggtgcgactgcggggaagaccacgagctagatcgcatcgatgcggaaatcgacctggaagaactaggattcttcgaaggtgacctggtaccgcatctggcagtctgtgcagaatgccagaagatgtggaactacgtggaggtttgtgaattcttctacgaccacgttgcctgtagcgcgaaaaaggtaaacggcgaagtcgccgaagcctacccctacccggtggcagtcgatattgtcggctacttttacaaaacctggcagggttgtccccgcgaggtttgcgagggcggctacgatccgctcagcgacctagcagaaggcctagattcctgactctcgcctcctgcttactgcaagcgagcaggagatccgaggaaaagctttccggcagcggcccgtccttccgcgctggaagcctgggtgctctggcttggcacccgcccttgcagctcccgccaccacgcccttacagacggtggcgggagcattcctttgtcacagcacccgttttttagaactgagctgtcagcgctaagtattatttccgataaacgcgattttcagaagtctgcgctagcgcaatggcaggtaagagcccgagcggtgtacctaggagagcggggcagggggtagtggagctcccgcgggtggaagcactttgggatacttagtttttgtccccactaccggttgggatttgtctgcggaaacggcggaattactaaccggaactgggcgatgaggagtgggatcccaatgggtgtttaccaacttcttttgactaaatagtcccgctccgaaaattgccagtcccaccagggaaagtaatattagtccgagtattcctccagccttggtagaccaacccaacagtaaacctatccaaccgaaatcggcgtcaccaaaggtggtattagcttttccgaaggaaccgagaacatccaaaagaaatgctgggaggaaggtaattaccagaccattagcgaaggcgcccagaatagctccgcgccgtcctccagtggcattaccatagactcctgcggcaccgccagtaaagaaatgaggaaccagacccggcatgattaatgccacgccgaacattgggtttagccagatggaaaggactgctaggctcactaaacctcccacgaaagaggaaaggaaacctattagcactgcgttttgggcataggggaaaacaataggcgcgtccagcgcaggtatagcgccgggaacaactttggcggcaatcccctggaaggcgggtaccagttcacctaagatggtgcgaaccccgaacagtatgactgctactgccaccccgaactcgagcccctgggtgaccgcctgcattaggtagttgcccacgttggcggcaccattcgggaacgctttaaaggcttcttgggaacctgcacgggcgatgaaaagtaccgccagaattacgtacattaatgccatagaaagcgcggtggccaccatcgaatctcgtaggaatcgcagcccttcgggaagtttcagttcttcggaggaagccgacatcttctttcccttgccacctacgagtttgccaacgcatccagaaactacataccccgcagtaccgaagtgaccaatggcgatagagtcatcgccggtgatacgacgtgtccagggatgagcaattgctggcagagaaaccattgctattcccaacaatgccgctccaaaaacaattacgacccaggtggggtagccagatggtgctaacaccatggttaacaaggttgccatgaatagcacgtgatgaccggtgagaaatacgtaactgagcggggtaaatctggccaacactagcgaaaccacgaatcccaggatcatgatccaggctacttgtccaccgaattcattttgcgcgatacctacgattgcttcattggtgggtaccactcctttggctccggtggcgccagttatcattgcgcctagaggctccaatgagctagaaactaacccagcaccggcaccaatcagcaggaaacccaaagtcgctttaattgcgccaccaacaacttttccagcaccacgtttcatcgccgccaaaccgactgcggtgataatcccgattaagaatgccggtacagacagaatctcatttaccaggaagtttgcgattgtaagaacggtattcataaggaatctcctcggtggtcaaaggttaaatatcgtaaagctcgcgtagggctttatcgatttccggcatggaagtaaagtcttggattacatgtaccggcaccccaacatcacccagagtggcggctatttcccccgaggtgagcaggaagtctgcttctttggctcgtccctttgcagagatagtgtcggtggcctcaacattcagatagggactccatccccattcatctaatacttgatccagggtgtttttcaggaataaagaggttcctaggccattgccgcacacggtgagtattttccctttagacggaactgagtcgctagctgttttccttgcgctagctgctcgatcaggtttcttggcgctgggagtcttatcttgacctttcggctttgcagtctgcgagtcgaagatttcgcgtagttcttcctcactgtttgctgcactaagcgagtctcttttagaagccaacagtttggctagctctttcatcgcctctagatgggaagaggtgtcggtagcagcgaaagccactaacaggtcaaccggatcattagatttatggttaaacgctactgggggatccagtcgcacccaggaaaaggaagtttcttttactgccgccgatggccgtgcatgagcgaatgcaaaccccggtgctattacgatgtaggggcctttttcctcaactgattcgatcatagcctctgtatattcgggagtgatttttccggccgattccaaaagctgcccagcatggcgaatcgctgagcgccaatcgctctctgagctgtgtaaatcaactgccccagttgccagtaatctatttagagttgacatgcatcccccttgaaagacactagaaattgttgctgaatcgggtcagcgctattttttatcctacggtaagaagagctattatcgtgtccttttaaaagtttctgctcggcatcctagattaggcaccacaccgccttggcgctaaaaacacatgaggcacactgaggtattgcgaacgtattgcgtctgtaatatattttctttgtgcgagtttttattttggatcgcgtatcgcaacgacatccagagttactgaaagaagacgtcctgcacgctttcgaaaatcatttcttgcatgctcaaagagataacggctcctggctgggggtaggtgcagattcaaatggtagaaatatagaaatgctttatcggatgagtggtaatgaggtgcttatctaccatgcaatgactccgcctaccaggaaatttactcgagaaattcgaaatctacaaaggaggaaataatggctaaacctgacgagctgtttaccggtacccgcagcgatgaagaagttgtttcccgatttggaatgactcttgatgaggttgaatcagaggcaaaacaagttgaggacgaaaatgctgacgacggtcttaccggagttttctactatggttctccgttagaccggattaaagatgatgagcccatgcgtaatatcagcgtgcgttttagcgtcagtgaaataaatgcaatcggggaactcgccaagaagtttcacgtcaccagaagtgaatatattcgtcgtaaggttctcggctgaacgtatttcaaaactagcaaagtcaagttacgtcctgattttagccagaaagtgcgaaagtaaggacatactttcgcataattgtgtcaaaatcaggacataaccgctaagcgcgcacttttcgcgcctctgtggttttgaaaaaagattttttagaccggtatgaagcacttttcgggcagttaaagcgagtgcgttagggggttgaggcaaacggctacggacaccttcatccagttctatgattccccgctgggcgagcttgccatgcgcagcgatggcagcgcactgatcgggttagggctagcatcacagcaggccgcggtggcaactgctgccggtacccgccctcaggaaaaatctttgcccatattccaagaaaccgcccgctggttagatagctattttcgaggacgcgccccctcctttaccccaaagctaaaactgagcggctcagactttcagaaacgggtttgcgaaatcatgcttaccatccccttcggggaaaccgtcacctatggggaaatcgctgcccggatcgcgcgggagcgaggtatcccgcgaatgtcagcgcaggcagttgggggagcggtaggggcaaatccgattttgataattgttccttgtcaccgggtaattggtgcgggcggtaacctcaccggctatggcgccgggatggagcgaaaaatccagctgctgaaactagaaaacgttgatatgacgagtctgtttgtgccaaagaaaaactcggtagcaaagaaacatccgctaccaaataagctgcgccctcgccccctaaataaaataggtgtttcgtaggcagccctatatcgctacctcgaagctggtggcgctatctttatgtagcctttagcggggctggagggcgaggtcgaagccctgggcgcgcaccgtgttcaacattccgcggcgcaggggcgcctcccgcagcatgatccgagtgaggctatcggtgaaagtatccgagcgtttgccatgtgcccgagtgtcatagtaggtagtcatttcctggtcataatccgcaaacgcttccagataggatccgtcaaagcagttataggagtcctcaaacatacgcagctccatgggcatccgtggcttgagctgcggctgttgccccgggtagccaaacattacccccagggcagggaaagtcagtttcggcagttgcaaaatctcaatcatccgcgctgggtcgttcaagattgaccctaagaaacaggtgcctaaccccagggattcggcggcattcaccaaattttgcgccatcagtaccgcatcggtaaagccctgaaaaaaaccgtccataccgcgcacgcagctattatcctcacctttttcctccacaatccggtaggaacggtacaggtcagtgaggaaaatccacagctgcggagcatcggcaatatagtcctgattagaaaccagagaaatctgccgcttcttttccggatcgttcacctgaataatcgaagccatttgcaccccgcaggaggtggcggtgcgtcgggtagcctcttttagctgcgctaatacctctggcgagattggctgagaatcaaaacgacgcaccgagcggtgtgctaactggtgttcgatagtttcagacatgagctctccttaaatcttcgccgatattgcgtgcggtttagccggtttcttgtcgttaagtttaacctacctgctggttaacttgcagcggtgaccagatgggtaatataggcgaggacgctaacgggcagggggattcatgattagaccaataagaaactttcaaagagccgcgattgaccatcctcatgcgcaaagcctagccggtcccctgggagatttttctttgtccgacacctggtcgctatcgcaacatttagtgctttacctgcaagaacagggaatagttagcggggatcgggtggcaatctgcagtgccaacagcgaataccatctattgctgtggatcgcttgtgaccagataggggcggtattcgttccgctggctaaagctgccgcgcctgctgatttacgagcgatggtgagtgactgtgccccgcgtctgctatttagcgatcaagaaggggagatacagatagatagcgccgcccgttctgccgcggaaactgcgccctcacaggggagcgccctcgataagccgttagttataaacctggctcacctgcatgaacgtatcttgaatgcccatagggagcatccgttttcgcctggggaactagccagtgagattgccccggtagccgagggcgagctggccgcaattatctatacctccgggacttccgggcggccgctgggggtggagcattcccgcgaaaccatgtattgggcgtgggcgaactatcgtgacgccttcgattaccgcaactctgataccgggttggcactcgcacccttgtcccatatcggcgggtttaacggcaccaccaacgatattttttgtcacggcggaaaagtggtagtgattgcggggttttctccgcttgccgctgcccggattattcgcgacgagcaagtcactatcgggttcgcggttcccaccatgttcaccgggatgctagatgccctcgaaaaagaaaaaggcgagtcgctcacggaaaatccgtttccgcattggcgccgtcccctgattggaggcgcacccctacctgcagctttagcgcggcggatggaaaaactacagctgcgtccgatccaagtgtgggggatgaccgaaaccggaggggctggttgctacctgggaataaacgaatccttagcgcacccggaggccgctggtcgtcccttcacctattctcaggtggcggtgcgcgatgcggatggcaaggtgctacccgcaggtagccaagggcaagtaaccatcggcggcccgcaggtatgtaaaaccaactacccgggcaaagccatcagtgctatcgaggggcaaattgaaaccggagatattggctttatcggcgaggacggattgctgcgcctgagcggacgggcaagcgatgtaatcatcagcggtggggaacacgttttccccgcgcaggttgaggacgcgctctcaacttttcccggtatcgggcaggtcgccgtaattggcctggaggacgaatattggggacagcgagtctgtgcagtaatcaccggaaccgccgccctcgaggatattaaaccgttcctagccggcaaattagccgcctacaagattcccaagcaaataatcaaagtagaaaacttacccctaaacagtgccggaaaactatcccgccaaaccctccgagaatcatttggcaacgagggtcgcgggaagtaagtcttcgtagggagcagggagtaagttttatccgagtgggcgcggtgggcataagaattcggaaaatgcctgcggtctttttccgaattcttgggcgggaggaaaaacttactccctgcgctacacacgcatattaggaagtacgagacgctagcaggacggaggcttctcggcgcgccctgcacattcctaaacgtaacttagaccccaagagagctgtggtggttcggtgccgctgctacaaatttgatagccactaatgcttgactaaggtttaccttagttattaggattttggtatggaaaatgcgtcttcattgccacaatctgatcgttcaaccagtactgctgccggacattgggtgcttgctcgtgccggaaagcgggtgcttcgccccggcggattgaaattgacgaaacggatgttgagtgcagccaatatgcagggaaaagaaatcgttgagttcgctccagggctgggtcgtactgcgcaattaatcatcaccgaaggtgtagcctcctatgttggtgttgatcaggatccggcggcagtcgcacgggtagaagccatcgttaaaccctccggtggaacagtcattaacgccaaagcgcaagacaccgggttgagtagtgaaagcgctgaggtagtggtcggtgaagcgatgctaacaatgcaaggtgagaaagctaaagccgaaatcgttgctgaggcatttcgtctcctggaaccagggggtcgttacgccatccacgagctcgggctcaccccaaatgatattgacccaaagttggctgacgggttacgcaagcaattagcccggacgattcgagttaacgcgcgcccgctgaccgagaatgaatggcgagcggtactcacgaatgcgggttttgaggtggaatggataggttttgcgccgatggcgttactatcgcccaggcgcaacttggcagatgaaggcctcttgggggtagcccggattatccgtaacctaatccgggataaagacctacgagcccgggttcttcagatgcgatccactttcaacaaataccgcgaccacctgaccggaatcgctatagtagctaagaagccatccaagtaatttatctccttaatcacctgaaaggtaaccgttatgagcgctgaaactccagcatccccagccctaggttttatcaacactctagctaatgaaatcgagtacgcggcaggctcaactgtctcaaaaaccttgctgcgcgcagagggcgtcaacgttgtgctattttccttcgatgccggcgaggagctttccgagcacacggctgcgatgccggtgctcgtcgaaaccctagaaggtgaactcgaaattaccgccgaaggtaaaactgtaaccctattacctggtggtttagtacatttcaccacccgattgccgcatgccgttaaagccatcaagccatcaaaaatggtgctctacatgctggcaagaccgcaaacccaaagtaacgactagtcaaaaaagcaatcacacagtttagttttatcgttctggccggatagcgcccgctaaactagcagcaacttaaacatgcgaagaagttatcgctgggagaagtgagaagtatccgcccagcaggatagggctcagtaagataagtcttccgggagcgtgcgaggaatttttgcaaggagcagggagtaagttttatccgagtgggcgcggtgggcataagaattcggaaaatgcctacggtctttttccgaattcttgggcgggaggaaaaacttactccctgcgctacccacgcatattaggaagtacgggacgctagcagggcggaggcctcttggcgcgcggtgccttcctccgctagttgcgccagattagcgggcaactcccggcctttcgcctgcatggcgcgcgcccacagccgccctgcccgataggaagaacgcacgagcggcccggccataaccgccgaaaatcccaggttataggcatattttgaaagttccacaaactcggttggttttacccagcgatcgatggggtgatgcagaggggaaggacgcagatactgggtgatggtcataatatcgactttggcatctttcaaggcgcgcagggcggcctcgatttcctcgcgggtttctcccatccctaaaattaggttcgatttggtaatcaaaccggcatctgaggcggcttctaaaacctctagggaacgctcatagcggaaggcggggcgaatctgccggaaaatccggggtacggtttccagattgtgtccgaatacttcggggttagacgagaatacttcctcaagggcaccttggtgtccgcgaaagtcatctacaagtagttctaccccggtattgggggatttagcgtgaatctggcgggcagtttccgcatacagccaggaggctccatcaggcaggtcatcgcgggaaactccagtgaccgtagcgtaacgcagacctagttcggcaaccgagtccgcgaccctgctaggttcctcgcggtcatattcgctggggcgcccggtagcaatatcgcaaaagtcgcagcgccgggtacagaccgcgccgccaatcaggaaggtggcttcgcgatcctgccaacattcatagatattcggacaattggcttccgcacagaccgtgtttagcccggagcggcgcaccaggtgccgcatatccatatagttcttacccgaaactaccttggtttttatccagtctggcttgttttcgatggggctgagggcgttccgtgcctctacccgcaatagcttgcggtctcccacctcaggaagtgtagacattttcgtcctccccgcgttgtccttcccctctaaagtaaggggtatctaagatgcgctgcaaactagctattaccggggcgcgcatggaggtcacggtttcctggcagccttgttcgctcatagaagttacccaagcatcggcgagaccgcagggaattatccgggcaaaatcactaaaagtggggttcacgttgagggcgaaaccatgcatagaagcaccccgagcagtatgaatcccgatggcggcaatcttcttatcgatttcacccggccgcacaatccaggcacctgcccgacccttaatccgctgcgcatgaatcccataggggtctaaggtatcgataactacctgttccacggcgcgaataaagcgaataacatctagaggctgcggtagcttcactatcgggtagcaaactagttgcccggggccatgccaagtaaccgatcccccgcggttaacctcaatcaccggtacatctttattgggcacatcttccggtttggtgttgcggccgacggtgaaagtaggggagtactgcaccaagagagcagtattttctcgcgttcccgctgctacctcgccgtgtacctgtttatgtagattatccagagtgcggtagtcctgcagctcggtggttaaatccaaaatttgcacgccttacagcctacctgctttaggtagatccggtcgtctcaaatagggttttcggaggtgctataagccagcaacgaaatcgcccaagatttcttccacttgtcgggtttccactaagaaaccgtcgtgaccggaagaagaagtgacttgccgatactgggcacccggaatctgacgcgccagttccgcacattcttccaccggaaataggcggtcggaatctactccgataactagggtgagcgcggagattgagccggcggcgcggcgggtaccgccacgtccgcgcccaatatcgtgagttatcatcgcgcgagttaacgcccgataagaaccaggatcaaaacgccgcgtcagtttcttaccgtgataatccaggtacgattccaccgcataacgtccacctgccagaggattttcaccgcattggggattatgcccaaaacgggtgtttaactcggtgctggtgcggtaggtggcgtgtgcgatttgtcgagccagcgccattccggggttacccgcttctttatcggccgctaaatagtagtcgccaccatcaaaggtgggatctagctcttgggcacgaacctgcatatgcgcccaaccggtctggtcagcgctggtcgcttcggcggtagcgaccagcgccaaggcccgtacgcgctgcggatataggcacgcccactccagggcacggaatcctcctgccgaaggcccgactatcaatgcccacgacaacacccccagatgtacccgcaacttgttttccgcgcgcacctggtcacgagtagtgatttctggaaaccgtgaaccccagggtagaccatcgggggcgggccaggccgggccagtagatccttggcatccccctagacaattgggagccaccacaaagtagcgatccgtatcgattggtttgcctgggcctactacccgctcccaccagccagcagtgggatgcgccgtggtttgcgacccaatcacatgggagtcaccagttagcgcatgctcaatcaaaattgcattagaggcatccgcgttcagcgtaccccaggtttcatacgccaggtagcctcccggcaggctgcccccattttctagaggcagttctcccagggcaacaaactggcggttaccggggtcatctccgggtagccaggcgggattatttgcccagttagtgccgggatactgttggcggggattaatcccagccctttgaacgttatccttagttaccgtttgcatttttttcttccttcaactgctattagctgcagctaccgagggtcacttcttaattgccgcgaatcccgcttcaagatcagcgattatgtcatctacgtcctctagaccaaccgaaacccggatagtggattggctgattcccgccgccgccaactcttgctcattagcttgcgaatgggtagtagaagccgggtgaataacttgggaacgcaaatctcccaggttcgccacattagttagcaaccccaaagcgtccacgaacgcctccccatctgcgcggtcgccctctaaatcgaaagccaaaaccgcgccggcaccgccgggagcatatttttgctgcaaatcatgggtgggagaagatgctagccccgaatagttaaccgatgctacctgcgggtgcgcctccaagaactccgccactttctgggcgttctctacatggcgttgcacccgcagcgaaagggtttcaatcccgatatttactaggaaagagttaaaggggctagccgcaaacccaaagtcgcgtagtccctgcactcgggctttcaggatgaatgcgctttcccctaggtctttatagaccaggccgtgataggagggatccggctggttgaactggggaaaacgctccgggtcggcgccccaatcgaaggagccaccatcaacaatcaccccttggatagagtttccgtgtccgcacagatatttcgaggccgaatgcaccacaatatcggctccccactctagggggcgggtcaaatagggggtagctaccgtgttatccacgataaaaggaaccccgacgcggtgagcggtctgtgccacggcctcaatatccagaaaatcattcttcgggttgggaatagtttccccaaagaaagcaatcgtgcggtcatcggcggctgcctcccattgcgcggcgtcggtagggtcggcaacgaaagtggtggtgatgccataacgcggcaggttgttggccaggaacgcgatggtgcctccgtatagcgaaggggaggcgacaatattgtcgccagcttcggcaatcgtcaaaatagttagggcaatcgcggcggctcccgaagaagtcgaaagcgcccccactccgccctctaaggagttcacccgctcctcgaaaacctcattagtggggttattgaggcgagtgtagatggggccgggttcttttagggcgaagcgatcggcgccctgtttcgcgtccttaaaaacatagccgttggtttgataaaggggtggtaccggggatcccacttctttatcggggcggtatccggcgtgaatctggcgggtattgaaaccccagttttgcttagtcattttcttttatccttttaaaaagtagatttgggttttataaaacgtttgccaatagtccacttcggataaagaaaaagcccggcaaggcagtccaaagggactttctttgcacgggcaaacgcgtcgccgcctaggggcggactgagaagagctgaccgtgcgggtcagctgaacattcgacgtgtcatgcacctaagataacccagtattccccgaataatacaagctattttcaaactttgagaactaagtcactatttcggtaaaagaaaattcttagctacaaagcgctctaatggctgaaaaagcgcctctcagcggttaatctggaggaaggaataaccgtaaaggagaaattatgagccaagacagcttgccaagcgtggacgccaatgctgacccggtagtttcctggaatgttcaagagggagcgatggtagctgccaaactggatcccactgcggtttgtcagttcttccaggaacaaaacatcgttgctgaggctgactggttcccggacactccccacttgttggggataaatatgctgcgcaaccaagctgatggtctggcttccctggatgaagcagacgaacccctgagagtaggggcggcgcttccagaagtagtagagaaactggcagagaagtttgaggccgatgtgctaatcggcgaatatcatgccaataaactgccggctgataaaccaatgccttcacgcaacgccgattccacccagcgggtgcgggtagtggagatttcgcaaatgccggtttcttcagtgccattttgcgccgcctcagaaggtaaaaccctaggctgtatcacccttccggagggtcggattgcgttattctatgaaactatccgggctgacctcgtagaaggctccctgatttctcgaatcccggctctgggactctatgtttctgaccatgaccagcggatagtggcagtgacttccgatgaaagtgccgacccagaaaaactggcgattcactcctggttgctacaaaatcaagtggttccgggagcagtcgaaaatccggatccagtcctactagaggcggttcgcgaatacctcggccattcttcttccccgaagcatattgccgaaaccgatggttgcgatgctgagcagttagcagaaacattcaaaataccaggtcaagatggtatggtgcgggcaatcgaagtcctgggactaccagctgaagccgctgccttcctctatgggcgtctggaattagaagacgtacctggaatcgaaatcttccatgaacctggttgggcggctgccatggggcacagcgtggatatgcggattctgtattctgatgaggacgcgaaaacgcctttcggtatcttgcggaagatggaaatagagcatcccactttgatgaaggctgcgaacattgcgcagttggtggtaggagtttgcctgctgggagcaggtttggtgggagtcgccggaaagaagcgtttttccaaactttcactgttgggtggggcgatgctctcccttgatgggggactgcgctcatcgatgattcaccatatgaagaaccggattgtaggagattactaacgcaggtgtttcctctggcgtccggcttttaaatggtagttggggtctaggggtatttgcgtgcgctagtgaggatcgcgtcgcgagtctttaagagagtgcaggaaagctattcgcttttcctgccgggcaatcagacggtcgatataggcagaaacttttccttgccagggtttcccagtttcagtaaccaggcgcgaacgccactttctccccgttcttagcgttgactgctcgggcaaagtagtgtcagcgggctcatccaaatcaacctttccgctcaatcggtggtgcgcccaatccaacgtgagtggtgaagatagggaaacatagttaggcgtttcggtgccatgcacgtcctcagcttctgtaactttgagtgccttaggaggattagcgataaacgagcaacagatcagcattactcgcgaaagcaagttaatccacagcagcaaagtggcgatagccgcaaaggaagcaagtaggggattatcaaccgctcccactaccgaggttcccagggatctaatcagggtggatagcatcccgaagattgctaaaccgcagagaagatcaatttttgggactctgactagagccacaaaacgaatcaaaatccacaggactaacccgtcaatagcggcactaataaagaaagatccggatcgaattagcagcgaagcaaacgcagattccaccccgattgccagcaatatttccttcccaacaatcgaattcatcaaggttaaaatcccggtggcgcccactcccaaagcaataaccacaaaccccagcaggtctcgcagtttctccattgccgccccggcaggtacctgatctattccgaacatggcgcggatagaagatttcatagcccgcattaccccggtagcggaaaatagcagcactactatcgccactattccggtgattgaaaaagaggtggaaagtaccagatctgagggactcaagattccagaagaaccgttccattccagcactcccggtagggaagtagcaatcgaggaaaatacggcatcctgcaggcgaggactacgcccgagggctcctagcaagaccgtgaccccaattgtgagggcggcagcgagcgaaaaaatcgcggaataagcaattccgccagccagcagcgctccccgtccattgctgtaacgcatgagcgaacgcacgatccgggtgcgctgaatccagagggcaaatgttttagctttttctgctatccctgcttgtgctctcacctcggaaaaagtaggtgaaaattgttcagggtggcgagcgcgcaccgatagctgcggcgagctgttgatttcttgcatagtttcaatctagcggtttcagattgcgaaagcattcttgaaacgaacaaaaacgctcggaaaaaaagacaattaggaacatttggggtagtctaggggaaagattttcccagacatggagtagctcatgctagcgcaccagcggcacgatgaaattttacggcaagtaaatcaaaacggatcagtgcgggtaactgacctggtaacgctgttggacgtatcagaaatgacggtgcggcgtgatatccgggtattggcggaaaaagggctactcgagcgggttcatggcggtgcggttaggctcgaggtagaaccggggcgcgcaaacctgcctgctagcgctcctagcggggaagaaaaactactcgcacaagccgcactagaaactatccggccaggctctagtgtgtttatcggaggcggaggctgcggctccattctggctaaactaataaccgagagcgaatttttttcctcgcttacagtagcaactaactttttgccagtcgcaaagattctcgacgatgcccaacaaaagcagcgcgacaacggcactgtccctgcccaaataattatttttggaggacaaccggaaaactatgaaaatctaggctcgctcaccttggcaaatgccgctaatttttatttccattcggtattcatagaggcagaaggaatagataaagaaaccggcttgagctgtgaaaatcttgataaagcagctttggaacgagtattggttcgcaattgtgaatttgctaccgtaatggtgcctacccgcagttgggggcgcacggcgttaaacgtagtttgccccctgaagcaactctcgcgggtggtatcggccacggagccgcctacagaaatagcggaggctttgacccaggcgcaaataatgctggacctgcgcgagccctaatcggatcagtaaagataggtaaagtcatgagcctgcacctaataattcccgctggaggccccggaagccggctctggccgctctcgcgggcagggcaacccaaatttctacttgacttgctgggtcaggggtctagccttctgcaagcgactgtggatcgacttcgccctctagctgcgtccttaacggtggtaaccggtgccgatcacgccgcagctgtagcctcccaaaacctagccgaacgtttaaaccccgaggtgagcagtaactatgtggcgctacttgagcccagccggaaaaactctctcggagcaattgcctgggcagcggcgcggctgcaagcaaaatatggctccgtgatagccggatcttttgcggctgaccatgcgatcaaagacgtagctgcatttcgcagcgcagtagctgcggcagttaaagccgccgagggcggaaaaatcgtaactattgggatagcccctacccacccttccactgcctacggctatatctgtgcttccgatacagttttgagttcggaaagtgagcagccagcagttctggtagcgaaaagttttcaagaaaaaccctctgagcgtcaggccagaagctacctagaagccgggggctacttttggaatgcaggaatgttcgttttcaacaccgagatcctgctctctcacctgcaaaaactgctccctgattactttgaaaccatccaagagatgctcaactatgaggaaggaagtccccagttcaaagagctgtggaactccctaccttcctatcccatcgataccgcaatagcggaaccggtagccgcagccggtggggtagccgtagtcgctgctgcggattttggttggtcagatgtgggagattttgattccctacatgctgcgctagcgggtgacaatctgcaaaccccgatagtgagaggagacggacgaactcaggttcttgctagtcccggtgcctttattgatcaccagggcgaagaaaaactggtagttctaggagttcctaacgcggtagtgatccgccgcggggacgtaactttggtgaccaccgcagacaatgcccaaaaaataggggacatggccagtgaacaaggggaactagcttgaggttcttaagacaggcgatagcgctgtttgtagcgactttgactctcgcgggttgtgcaggcaccaatgtggcacccacgggttatataaatgccgcagattttcgcacctgcctgctgaccttggggaaagacaaggtgggctcgattaactccagtgccatcagcgctttaaatgacggcaagaaacggctgggggtggccgcccatcgcagcatggttgattccccggaaaagatagagaaggctatcgctcgcgatatttctatcaactgctccttgatcattggggtgggggaggcctttgtggaacccctgatgaatcaggcaaaatatcatcgagcgcgtcattttgctctgctgctgccaccgggagctactgctcaagccacccgagataacgtcgcaatagttacctatgacctgagtcagcccgcctatgtagctgggtttattgcggcgggtacttctgcaagtgggcaggtagcggcaattgcgggggcgaaaaaccggactaatcaaactttgctggcagcttttgctaaaggggttgcccgctacaacaccgaacaagccgaaaaaaattcccaagcggtgaaagttaatgcgaaagccaatggaaatggcttatatctgggggagaagactactgctccccaggtaaaaggcgaagtagaaaccctaataaagcagggtgcggatgtgattttctttgctgaaggagcgcagagcccagcagggttatcagcgattagtaaggaaaatcaggatcggggaaaagccgctaaagctgctgctgaagcccgcgaaagtgcgcagccagatggcgagcccgccagcaatagcccctctgaaagcaccggagaatctaatccttcctcagagccgaccgcggttgtgccggaaaatgatgctgtaggttcggttactgcgatttggtatttaactgatggtcaccaaacccagtcaagcccggcgggaaagacccctcccgttttaacgtcgattgttccagatctttcgcaggcgatgatttctttgattgaacaggcacgcaaagaccgatatgccgctaactcgactcagattttgggaacctataagaacggctgggtgggacttaccccattctatgaatatgactctacggtgcctaatggggttaagaaaaagtcgcaaaccattgaggaggagttccggcaaggaactttaaaactgtagcgttattcttcctgctagttagggttttgaaagagaaaatcggcgatgttcctgttatcagtgggtagattagcccctgagattaggcttcgtcgggatagagctgatgaatagctgctgctaaatcgatgacttcttttttactcatctcgattactaggcgcccgccgcctaaagccggtaggcgcaataccacttcccgaccttcttccgtgcgagctccgtcctcggctacttctaacggaccatctccggttcgcggtttcattgctgccatgctgacccccagagagctagataaataccagtaaaattagtgctaactcagccaattatagcagatgaaagccctagtgccggggaggtgtttgtcacttacctgctatttgttgctattgatattattcctgtccaactttagatacttgaaactgatagtttctaaatagcgtgggtgttagtgtaaaaaagtgactgtgaaacttttccccagttttgttggatttttccccactctcttctggggtaccgggcacccagcttctccggtcactttgattgttttgacgattgttatcgcggtgctgctgctcgctgagggacaacttaaagaatagggcgtatgtactacttcttatcggtactagcgctctccctggtgatgaacctcctgatcacctggttttttgagctggtggtagcgctcacctgggggttgcgcacctggcgtgccctgttcatagtagctttggtaaacgcagctactaatccgccggtatctgcgttgatggttttccttagtttcaccactctagggcgcagtagtctgtggttattactaatccttgagcccctgattgtgctgatagaaggctggatttatcaacgtgccctgccgcagttagctcgtccctatttattctcattggttgcaaatctggcctcagcagtcctagggatgttgatatgattagagggcataatcccctaggagccaaatatgtctgattcccctgcagttttgaaaaagttccgaatttttattgtcactttattcctggcggcgctatccttaatagttgcccccagttccgccaggggagatgatgctaagccgtggagtgctatgacgtccgaagattattacgttattgtgtctgcctgggacggggtaaatatccgagaatatcctggtgtcaactacgataaattggcgtttgcctctcagggaacccgcctacacgtaatcggatccgtaactaatgagaatggcaagccttggctgagaatagactatccttccggatgggcggctgccagtgaggtaacaaacgaacggtattatacgccgccagctccggctatcactgaatctgctccggtggctccgaaaactacgcccacgcaaaccgccactaagactgtaaccgccaccgcgaaggccccggatgcggagcaatcttcgcaaaagtcaggtatcagtaagggattggttatcgccctggtggcgatagtggcggttatctgcataatctcgattctgttgctttacatgctatttattagaggcaagaagaacttgcccggctccccggccacgccttggtagttccgcttaagaagcttcgggagcctgaccgataatttctagggcctgggcaggggtatcaaccagttgcaccgccgctagctccgtctcagtaatagttcccgcgcttaatagttgatcttttagccaggaaatcagcccgctccaatagtcgcgtcctaccaatacgacagggaaggacttaatctttccggtttccgccaaggttacggcctcaaaaagctcatctaaagtaccaaatcctcccggaaggactacgaagccctgggcgtatttaacaaacatggttttgcgagcaaagaaataccggaaatagatccccagcgaaacccaatcattgaacatttgctcatggggtagctcgattcctagtcccaccgaaatccctccggcttcggtacagcctttgcaggtggcctccatttgcccggggcctccaccggtaatcaccgaccagccggattcagccagcaatttcccggtttcttcccccagggcgtactcggggctatcttggggagtgcgagctgagccaaaaaccgaaatcgccggccctagttcggccagggctccaaaaccctcaataaactcactttgaatccgcagcacccgccaagtgtcttcatgtaaccaatcagtatccttttgcggacccaacaaacgctgttcggaagtctccgtgggtcttaaggggctccgcatctgaatagggccactacggtaaacacctttattcgtaaaacttctcactcgcgcagcatatcaggacgcaggttaagccttagttaaccccgccgaaacattaggtagcgaggtgttagagccgaaacgaaagtgcaggcagggctgggataaaaaccaataaatacccgtaaaaagtgagaaaaatatttgtgttttattcttgcgggcagtaaaccccgactgctagtccatctccacaggtcagcacattggcaatgaaacgctcatcttcaagcagggaagtgaccgcctgccgcatatgggtagtttccatttctcgacgggcgggatcgccaacttgatccatccagagggcgtgcacgattgctaccatgccacccgggcgtaatatccgggtagcctgttcgatatagctagcaatttcccgcacatcaccgtcaatcaccaccagatcgtaggcggcgcctgccatccggggcaatacttccagggcatgaccgttaatcaagcgggtacggttcgatttttgggcagcagctcgaaaagcgctgcgagcggccgcctggaactctgactccgagtcaatagtggtcagcactccgttttcggacattcctgctagcaggtagaggccagaaactcccgctccagtcccaatctcaaaaatggctttagctccgcaagcagccgaaagcatccggagagctgctccagtggcgggcgaaaccggagccgctcccatttctacagctgcggcgcgcgctgccacggtgacttcgtcctctaccacctgagactcggtccagtcccaacttaaagccttgttgttattcatgaagatttccttgctagcggatttgcgctttttaccagtttatgaaacctgcgaggccgcttacagtggtttgacacccagattgcgtcctgccagggaacgggtgcgtttagtaagcgccttagccacctggttaatagcttgcgaggccggagaatctgggtgcatggctaccaccggagttccctggtcagagccttcccgcaaggtgatatccagcggtacctgcgccaaaaccggaacctgataacccagttgcgcgctaaggcgtccggctaccatttctccgccaccggtaccaaacaggttcaacttgctgccgtccggctgggacaggtaagacatattttctattaccccgattactcgctgatcagtttgcgctccgataactccggcgcgttcagcaacttctgctgccgctacctgcggagtagtcaccaccaaaatctctgatcggggtagcagctgggaaatcgagattgccacgtcaccggttcccggcggtagatccagtagtaaaacatccaggtcgccccagtacacatcggctaaaaattgctgcagtgcacggtgcaacataggaccgcgccaaatcaccggctgcccttccgggacgaacattccgatagagatgactttgaccccgccggcaaccgggggaacgatcatgccgtcgataaccgtaggttcttccgctacccctagcatccggggaatggaaaaaccataaatatcggcgtctaacactccaactttgagtccttgtgccgctaaagccagtgccaggttagcggtcatcgaagattttcctaccccgcctttaccggaggtaatcgcgtagacgcgggtgagcgaatctggctgggcgaaaggaataacattttgcggtcccgaaagtttttcctttaaggctgcccgctgggcttcatccatcacgcccatctgcaccgtgacttccttaacgccgggaactttagccgcttcttcacggacatctttttcgatggtggcctgtaacggacaaccggcgatggttaaatcaaccccgacactaaccgcaccgtcctcgccgatagaaacttcccgcaccatatccaggtcggtgatagcccgccccagttcgggatcgattacccgggatagtgcctgccttactgcctcttcatttaactgactcatgccctctatcctatatggcgcgtgccgcgtcctcacttttggctgcgctgcccttccgaaagcaaaatcaggagtttaactattttttactttattcacgaggtgacggcgggggattatcctctccgcgcgcatgttttccccgctcaggatgatttatgtcttcctctatctcgcggcgtgccttttggtactcctcttcgcggagctcatctagaaggtcgcggagttcgccacgaacgaagtctcgggtggccacctctgacattgacagccgcaaagaagcaatctcgcgggtgagatactcaatctcggcatgattcttttccgcgcgccgtcggtcttgttccgcggaaactcggtcacggtcgtcttgccggttttgtgccaacaaaatcaggggagaagcataggaagcctgcaaagatagcatcaaagtgagggcggtaaagccgatagctgagctgtcaaaacgccaggcatcgggagcccaagagttccaacctaaccacaaaactacgaataccgtcaggtagaccaagaattgcggggttccctggaaacgcgcaaaagattctgaaactcgtcccacgccctcggactgtaaatttatgcgcggaagtcgaaaacgacgccttctttcgcggggagtatcaagcctgtccgccatcttcgctcctttccctgtccatcgctaggtcggttacatcctcgtcagcgtcgcgccaatctgcaggtaagaggtgatcaaggacgtcatcaaccgagaccgcacccagcaggtgacgattcttatcaacaaccggtactgcggttagattataggtagccagcagcctggttaccgtcccaattccggcagtgggatccacccccttaagatcatcatcaaggatttgacccagcaaggtttgaggcggctcccgcagagctttctggatatggacagcccctaagaatcgaccggtgggagtttcggtgggcgggcggcaaacacacaccatcgcggccagggcgggaggtatatcttgccggcgcacatgagccagcaaagtggccacgtcggcatcggggggtaaaaccaccggggtggtggtcatcaaaccaccagcggtgcgttccccgtacaccatcaggcggcgaacgtcggcggcctcctccggttccatctcagccagcaggatttgcgcttgtttttctggcagttctttcaccaagtcggtagcatcatctggctgcatcacatctaaaacatcggcggcgcgggcaatatctaaggaagtgaggatggaaacgcgatcttcttgtcctagttcttccaatacgtccgctagccgttcatcacccagctgagcagccacttctaggcggcgtttttccggcaaatcggccagtacatctgccacgtctgccgctttcgcatcttctaacttagccaacagggtagtggcttcctgcgggagcaccgatttgcgcagatgagttacctctgaaggatcaaccagcatagtttctccgcggctaagtgccagcgcggaagttacccgctgtacatagagcttggtgatataccagtcgcgacggtcatcttgctccatgcacatgtcttggattttcacgtccccggaaccatcgcgcatagataggacgcgatccatcagttcgcccatcaccatggtttccgctacccgctgctggaactgacggatattaaccaatccggtagtgattacttgtcccggttgaatggccacaatccgagttaccggcacaaacacccggcggtgtccggcaacctcaactaccaagcccaccaccgtgggcagcccggtaaaacgcaaaacgataatcacatcggttacccggccgatttcgtctcctaccgggtcaaatacccgagtgcccgccagttttccaataaaaacacgggaaccgatgggtttgattgagtgcttggcatgctccataaatctaactttacgtgaagattggcattattttgccgcagcttctcttggagacgctcattcatataggtttcgtaggtttaggacgaggcaaaagggtggaaaacagattcgccgaaggctaaatcagcaggggcaagcgcagatgattttgcattgccagcaggtaacgtacacactgaagctatggctttattccaaaatcacccggagaccgccgcccccagcgggcaggatctagcgacttttccttccagagaaagcgcggaagaagccattaattacttgcagtccaaagactttccggtgcgtcaactactggtacaagagcgggggctgacccgctccaatcaagtagtcggggtggtcacctggccaaaagccctgctttctggttttacccgtggcttgatgatgggacttttcttagctttactctttgtgctttggaaaccggcatgggcggtttttgcgcccctaataatcggagccttcgctatttttcgagctattgaacgcctagttgcctgggcgattcggtcttcctccgccggttatcccatcgctttttcatcttccctgaccgccgagaaacacgtcctaatgaccagcgaggattactacactgcccggcgtctcctcttagatgattcccgtttccaatcggcagtagttgagcaagacgctccgagtaatgtcacaagcggccccaccgagtttggttcgggttcagatgaacagccgcgctacggggtacgccttactccggatgcgcgtcgccaattgcgtgctcaacaggaacagctaaaagggcaagctcctgcggcatcggcgcccaacctgcctcctgcagtttcgcaaactccagaaaagaagcaggaaaactctcctggacgggaagaaaacggagaagtttcggaggaaacgtctccaaacagtgacctaaatgacgcccgttagcactggtcgtgacgtcaggggtatatttaaggaagttccggcgcagcgaccctaatcccgccggttttttcatgctcgagctaatactcagaacggctgtaaggaggcgcggatgaaggttcgccaggatttgcgaaatgtggcaatcgttgcccacgtagaccacggaaaaactaccctagtggataaaatgctttgggaatcgggagccttcggcgatcatgccagcgtagaaaaaaccggtgaacgggtgatggattctggcgatttggaacgcgaaaaggggattactatcctcgcgaaaaatactgccgtccattatgcggggaaagctgcccaaaacgtaggggttagcgaagggatcaccattaacgtggtggacacccctggacacgccgattttggaggagaagttgagcgcgccctctctatggtggatggggtagtgctgctggtagatgccgccgaaggaccgctgccacagacccggtttgtgttgcgcaaagcgcttgctgcccggctgccggtaatcgtggtgattaataaagtcgatcgcccagattcgcggattgaagaagtagaagccgagaccgttgacctgctgctagctttggcgcaagacctggtagacgagggcgaagaagtagatttagattctttgctcgatgttccggtgctttattgttcggcaaaagctggctgctgctcctgggaaaaacctgcccgaggcgagctgcctggcagcgacctccacgacctctttgatgcgattatcaaccggattcccgggcctgaatatgacccggatgctcccttgggcgcccacgtaaccaacctggattcttctcctttcctagggcgcctggccttgctccgtatccacaacggcactttgcggcagggtgaacacgtaggttgggcgcgtcatgacggctcaattactgacgtgaagctcaccgagctgctggccactttcggtttggaacgaaaaagcgtagaggaagcccacgccggagatatcgtggcggtagccggaatcccggaaatcactatcggggaatccctggtggatttagaggatccccgtcctctgccactgattaaagtagatgatcccgctatttctatgaccatcggtaccaacacttctccgctggccggcagggttaaagggcataaactcacggctcgccaagttaaagaccgcctagatcgcgaactgatcgggaacgtgtccttaaaagtgttgcctactgagcgcccagatgcctgggaggtgcaaggacgcggggaattagccttggcgatcctaattgaacagatgcgccgggaagggttcgagttaaccgccgggaaaccccaggtagtaaccaaagagattgacgggaaaacctgtgagccgatggagctaatgactatcgatgttcccgaagattatctgggtaaagtcaccgaactaatggcggctcgcaaaggtaagctccaaaccatgtctaatcatggcaccggctgggtgcgcctgattttccgggtaccggcgcgtggcctgatttctttccgttccaagttcctgaccgatactcgcggttcggggatcgcttcttccattgctgacggctatgcaccctggcaaggaaccattacccgccggcaaagcggctcgttggtttcggatcgcgccgggaaatccaccccctacgccctgattcagctgcaagaacggggcagttttattattcaacccggtagtgaagtctacgaggggcaagtggtagccgaaaacccccgcggggaagatatggatgtcaacatcacccgggagaagaaacaaacgaatatgcgttcttccactgccgatgccttcgaggggctagttcctccccgggtgctgactctggaagaatccctagagtttgcagccgaggacgaatgcgtcgaggttaccccggaagaaatccggatccgcaaagtggtattaagtgcgcaagaccgtttcaaaattgcttcgcgtcggcgccgtcaagaacgcggagaataagagatttctgaagagcccgcggcagtcagatttttggtgggggaggaactcgtttcccggtaaccatcttttctgccggtactgtgaccgggcctttgcgggtcataatagtgacgctagcagggcttaccgctaatacttcccccagggcgtcatagagaccatcggcttcccggcgacgtaacactacccgttcgcctactttccatgacagccacggaagacgcggcggcggtttcggattgcctacagacttcatagtgagatactagcaatatcaagatcaaggagaatctatgacttacgtaatcgctgaaccctgcgtagatgttaaggatcgtgcctgcgtcgatgaatgccctgtagattgcatctacgagggtaaacgcacgctctatattcatcctgaagaatgcgtagactgtggggcttgcgaaccggtgtgcccggttgaagctatcttctatgaagatgacctgcccgaagaatgggcggactactatcgcgccaacgtggacttctttgaacttaagggtttgggatctccggggggagcctccagcgtgggggccaccggctatgatgatcccatgattgaaaaactacctccccgcgaagaataattttcaccaagtccatttccgcttaactggacggaaacaacggtagcagatggtgtcggtgccttaggctgagaacatgaaaaacaccgatcttccgcgcccgctgaatttaccagttttcccttgggacttacttgacccttatcgggaaaaagcggcagcagtttcgggtggagctgtagatttatctatcggcactcccgtcgatagttgcccccaaagtgcgcaaagcgcactggcagccgccgcaaatagtccaggctatcctacagttatcggcagcccccagctgcgccgcgcgattgtcagctgggcgcgtaagaggggaattacctgcctgaccgaagactcttgcctgccaactgtggggtctaaggaactggtcgctaacctggggtggcagctggggataggggctggtgacaaaattctgttccccgaaattgcctaccctacctacgatatttgtgcccggcttgccggtgctcaagggattccggtttccaatgacatttcaacttggccccgcgatgccgcgttggtgtggatcaatacccctgctaatcccaccggctgggtggcgagtaagcattggttgcgagaagtggtttcttgggcgcgggaagtaggtgccgtggtagctagcgacgaatgctacgccgagctcacctatgggggatctgatccggcgccctcattactgcaagaggacgtgtgtggggatagcccggaaaatctactgttggtgtattcagtttctaaagaatcgaatttggcaggttaccgtgccgcttttatagccggcgatccgcagcttattccagcgctggtagcagtgcgcaagcatagcggacaaatgatgcccgctccagtacagtccgcattaacccaagtgctttcagaacgctcccacgtgggtgaacaagtggagcggtatgctcggcggcgaaaaattcttgcggcagcgctagaaaatgcgggtcttaagattgctaaagaatgccaagccggtctttacctttgggtttttgatcctaaagaccctgctgatgagcagaaagtaagctttgatagcggagccgattggcgtttactagatagatttgcgcaggtaggactggtggtagcgccggaaagcttctacaattcttctcccggttcgcacgtgcgagtagcgttatgtgtcagcgatcaggaaataaataaagctgccaattatttagcgacatttgcctaagaatggtgaagtctttaagaaactgttatagtcttgagggtaataagtcctacatatcaaaaacgggatggcttcaagtcaccccctttcgggaaggtcgtcgaaatggctgagaatctccaaaacacccaagcaccagatagtttcggccgccaaccgggtgtgctgcaagttgacggtaaaactattgaatttccgcccgtgcaggcaacctgcggtgaccaaggtattgatgtttctaaactccgtaatcaaaccggattggtggcgctagatcctggtttttccaccactgcctcttgtacttctaaagtaaccttcattgatggcggcaaagggattttgcgctatcgcggttacccgattgatcagctggctaaccactccagtttcctggaagttgcttatttgctgatcaggggagaattgcctacgccttcgcaattggacgagttcgtgcggcgagtaaagcggcaacgcctgttgcacgaagacttccgagcattctttactgccttcccctccgatggtcaccccatggctattttgcagggtggcatcgctgggatggctacctattacgaggatactttcgccgatgtacatgaccccgagttgcaagatattcaggcggtgcagctgctggcgaaagtaccaaccatgatttcctatatcgctaaacgggctgccggcctgccgctgctgtacccggataacgagcgctcctatgtagaggactttattcgcttgaccttcggtttaccctaccagtcctacgatattgatcccgcaattgtgcgcgccctggaagtgttgttcatcttgcatgctgaccacgaacaaaactgttctacctccacagttcgcttagtgggatcctctaacgccaatatgtatgcttcgattgcctctggcgtaggagcgctatcggggccgctgcacgggggcgctaacgaggcagtgctgcggatgctgatcaatattcgcgacaccaatatgtcgattaaggatttcgtgaataaggtcaagaataaggaaaaaggcgttaagctgatgggcttcggccaccgcgtctacaagaactatgacccccgtgctgcgattgtgcgggaacaagctcacaacgtccttgatcgcatgggcaagaacaacgatttgtttgatctagccatggagctagagcaggtggcgctgtctgatgattacttcattgaacgcaagctttatccgaacgttgacttctacaccggtctgatctattcggcgatgggtttccccaccaagatgttcaccccgctattcgcgctcgggcgcctgcccggctggatttctcaatacatcgaaatgcttcatgaccccatgacccgtatcggtcgtccccgtcaggtttaccaaggtgctccccagcgtgactatgtcccgctgcggatgcgggaagcaaaatagttatccccactagctaggatgcgggtgaggtcgctcggcggcctcacccgttctatttgcacgcactatgctaggttatggacagatgttttccagcaagaagggggaaggatgcaggacgttcaggaaagtttatctgcaggtgaactaacctttaacaccgatccgctttctccgcctccagctatgcgctccgggcgtatacctcgcctttctagcctgtggattattttattttcgctgttgggattgctagcttctctagaactttggcgcaccgaaatgcttcaccgcgcccagccgggacgcggcttaggttgttcgctaaacaacgtggtcgattgtcgcggagctatggaatctgcagccggtcacctgcttttcgggattcccaattcgatttttggcatgctggcgtttgcggctctcttagcggcaggtatctatctaatagctggggggcgggtgccgaaatggggactgtttctctttatcatcggaaccagcgccgggctagtagcagtgattttcttcttggcaacctcggtattccaactacattctctatgtccctactgtttcttgacctgggtggccacgattttcttagcctggctatcctatgcgctttgggtgcgagcagcggctacgccccttcgcccgctaggcggggcgcggcgcgttctggtgggctattggtggctgggcgccatcttgagcgttgcagttatcgtagcggtgctatttacagttttcgggttagagattttccgcctgtaactttagaggtaacgcgatgaacaggaaaaccatgggcgaaccagcagaccctgaaggagccacctctcgggtagtacaagactatttaaagcaccttctgggagctaccgaatggggaggaagtaccctttcagtatcgggactggcgcaaagaatgggggtagcggtctccaccgcctctgagaatgtgcggcgtctggacaagttagggctgattacccacgttccttaccgggggatcactctgactgcagagggtaaaaagttagctttgaagatggtgcgcaagcatcgcatcctcgagacctatctgcatcaataattggggtatccgtgggatcaggttcatgtcgaggccgatgttttagagcacgcggcctccgataagttgattgcggctatggaccaggcgctggggactccgaaggttgatcctcatggagacccgattcccaccgcggatggccatcttccgaaagtttccaccttgcccctagctgaagctccgataaatactctcgccaccgtggcacgaataaaagactccaatgcccagctgttgcgcttcttagaatcggtaggaattgtacctggctgctccctatcgcctttagaaaaaatccctgaagccggaattatgcggatagaggtagacgggcgagaaattaccctgggtaaaccggcagtcgccgcgatctgggtaactgcctaacgcgggcaaggtaataactgctgattacggtaggtaccggctcctagttgccagtaattttgagggtagagccctgtcccttagtggcaatcacctcaatctggtcagaaatttcgccacgcagtgaagccacgtggctaattaaccctacggttctgcccgaggctgaggttttcttcaaagcctgcataacctccgcccgtttagtgtcatcaagagtgccaaagccctcatcaataaacatagaagagatctcgaccccgcccgcctcggcggttaccacttctgataatcccaaggctaaagacaaggaacaataaaatagttccccgccagaaagcgcagaaatctcccgagttttgtcggaaaatttatcggtgacggctaaagataaagcctgattacgacgacgggaagactcggtatcggtgcgagaaagctggtagcgccctccggaaatacccgttagataaggatttgcagcatttagcacttcttcgaagcgatcgagcaatacccaggtagccagaggcgctcttagcgcggacccttcttcgcctttcgccaaattagcgaatgtaatcagcatggaggtgtcccggatggactccaaataccgggcggtctctgcctgcaggtcacttacggtcatctccactgtttttagctgctctttaaccttggctagcttctcttgcttcttttggaaaatctctgcttcctcgttcgccttggtctctaaagcttctaaatccggcagtacaaagtccgcttgttttaccttctgaatccggtcggactgcagctttacctggttggctttaaacgcatcctcccaggtttgtacctcgcgctttagttcttggtatttctcatcttccaagagggcgctctgtactgccgaggcatcgggaaactgttgttcccgtaaggactgctctaaacgggtttgcgcttgtgccaagttgctcaaggcatctttggtctctcgcagcgcttttatcaaagaagaaagtttttcttgctcccgtttgagggtttgttggcgagccaccaggtcgttagattctcccgaagcagcaatcgccgcttttatctcccggatctgctccagcgcagtggtgaccttatttttttcaagtttcgcagcattagccgacttttggatcgcgtcccgatacttttgagcctgcttttctaactctgctagccgctttcgtagtttctttagtttttcagcctgttcctgcaagtaggcaacccggcgatcaatgctgtgcgcatttcccggatacttttcccgtagctgcttgatttcgccccgtagccgattccgctcatttgttacctgctcctgtttttccttcaaagtggtctttgcgctggtgagctggtttctgagtttggtcagctgactgagagaatgcttgccactagcggtgccgtgagccggatggggatgggtgggtgatccacaaaccgggcagggttcctccgcttgcaggcggtcagctaaaagaatcgaagagtccacgaaaaactcgcgctcgtattcggcggctgctgcctgtgccttcgtcacctttttctctaaggccggaagtttacttgtctcgtcctgaaaacgctggaaatcctgcaagaaatgttggcgttccccctcatatttacgcaactccagttgtttttgtcgcgcctgctctaaatggagttgttccttttctaggcatgcctgctgccttagcagcgccctaagattcggcagtaactgtgtaaactcttttgcggcttgggcagcagctttggaatgttcgacatacccctggcgggcttttttggcctcattttccaggctctcgagttttttctgccgctcgattagaggagccagtgcccccaggtcattatcgtttttccgctgttgcccggttatcttttcttctaggtcagctaacccgctggtatcggctggcggctggcaagtggtaaaaggtgcgggagcagcttgtaaattttttgacagccgctcctgggttttaaccaatttctcttggtactgctgttttgcttttatttccgtatgcactcgggtagcgcgttcatgaagcgctattttttcgcgatggctttttacctgatcctggcgttctcgaagctgtttttctgcggctaacaggcgagttagttcctggaagtcttgggttaaagtctttgccttttcctttttttccaaggcggcctgatatttttctcgagccgcgtctacttgctgagtatgttctgctatccactcgctagagtgcgcggaaggcaacagatagtaaggttcccaagatttgatcaaatcttcatctaaaacttctggtaaagaggcttgggtatcgcgtaaagtttctaactcgctgcgggaactagcaaccgacttcgccaagttactccagttctcggtaaacagcttaagctggctgataattgtccgtgactctgttttggcgctagtttgtgcctggtgggcgcggtcgatgaattctttttgcatccgctcgaaaatctgggtgccaaaaatctgttgcaaaatctcttgccgttcatccgaggacgcccgcaaaaagcgggagaatgctccttgcggcaaaatcacggtttgcaagaactgcgacttcgtcaacgggaggattctggaaactagctcctcattgacagttctaggttgggaggcaatcgcgtccccgggatctacatcttcactgctgagacgccagagacttgcctgcgccggttgggaggtagtacctgaaccgcgccgtttggggcgatcatatgtcggggtgcgccaaactcgataaagttgtccgcgtgcctcgaaatctagttgcacccagctaacttgattatctccggcatagtcggagcgtagacggcttttcgaagagttagattccagggctacgtcgttatagagggcgaaaacaatcgcatccagaatcgtagatttcccggaaccagtggggccatgaatcaaaaacaccccggagccggtaccgagtttggtgaaatcaatagtttctttgcccccaaaagaccccacggcctcaaagctgagttttaaaatccgcatctaactctcctcgcgaacctgttcgtaaacctgctctaccagctggttttcctcttcatctagctccttgcctaggcgggcttggcaaaagaaatctttggcaagtgcgtcggggcgaaaacgattgattcgcagcgcctggcgttgatcctccatgctggtggtggtgacctcatgcaagaacgataaggctttcgggaaacgctgctttaacttggagaccataaaattggggcgctctaggtcggttaccgttatttccagccaatatcgggcgtattcctggtaggagggactagacattaagttttcaaaagaatccttaatgcgtcctacaggccggtaaaccggggtgggtattagctggagatccatatccggggcggcagtatctaaaagcaccaaagatttgggagtatggcattccgaaaatgagaaagttattggggatccactatagcgtcctgaagactgcttagtatgtagtttttgcggcacgtgtaaatgacccagcgccaaataatctggagccggcaaatcgggggaagctgcaggttcggtttccccatatttttcaaaaacttggaggggaacagattgcaccgtaccgacggtgatatcccgttcgctatcactggcagcacccccgactgcgaaagcgtgggccattactatagtgcggttgactgcaggtaacaggcgctgggctttgccgacccggcgcatagccgccgctaccactgcttcatgagaacggggtaggcaaggaagtgaatcttcatccgaatcgtccactgccgattcttggttttcgtcaggtagcggtccgtcataaagactggtgcgcaccatatcggggttgagatagggcagcccccaaacccgcacggtttcgccggctgccgagatctctactggagaggaaatgtcggttagagaagtgcgtaaatgcaggttgccgcgcacatagggggctaaaaatcccagtctttctgcggaatcatgattgccgggggttaaaatcactgcggttagctcagttagttccgcgagcgcctgggaaacgatttctaaagattccagcgagggaattgcgcgatcgaaaacatccccagaaaccattactgcttggatgttttcctcacgaaccagctgggtgagaaaggcgaaaaattggcgatgagccgcagataaatcttccccatagagagtgcgtcccacatgccagtcggaggtgtggattaacttcatacaatctattttacttatttaccggctgggcaccggagctttaaggtgcgatatgtttaaagatagcaatacttccaggaggcgaagggatggaacaggagtcactgttttcgcccggtagaccggcgttgattgttccgctgaccggcacgaatcagactgaactacgggggcaaatttctcggattccgcgggtagctgacctagtggagtggcgtcttgaccagcttcgtgactaccataaccccgcctacttgcgcgaaattgtgggtcaggtggctccggctatcaaacttccttggctagcaacctgtcgcagcacccggcagggaggaggctcgcggatggtacccacccaccagctggaaaccttgaagatgctggtgaaggcgggagctagcgccctcgacatagaggatgactttactttggcaactgaggctttagactacgcccgtgcccacggggtagtgagtgtgctttctcgtcattattttggagcagaagaagcccaaaagatgaatcaagaaagcatctataactggctagatgctgcccatgaacggggggcgcaagtcgccaaactggccttgactattaacgatgcctcgcaccttttagaagtgttctcggcaatggaaaaatactataaagaaaccgctggtaatcgccggtttatggttatcggtatgggaactattggcaccgcgactcgcttgatggggggagtcttcggcaattgcgccaccttcgcggcgcttccgggatctgatcccagcgctcctgggcaagttagtgcttctttacaggcagaggtgttatccgtcctcggaaaggaagaatcataatatgcgaaatattggcgaagacgtagggctcctgttagaaatcgccgatcaggtagatcggtataccttgcagcattttagccagcgcgactatcaggtgtatgaaaaagcagatatgaccccggtatcggatattgatcggggcgccgagcagatgattcgccaggcgctggcggctgcccgccccgatgacttgatttatggggaagaatacgggggaaaaaccagagaagttggccgtgctcgttggataatcgacccaattgatggcactaaaaattttgtgcggggagtgccggtttgggcaactctgatcggtctggaagttgccggagaaatggtggcttcgatagttagcgccccagctttggcgcggcgctggtgggcaggacgtggtctcggatcgtggcgctcgtttaatggcggggagccgcaaccaaacaaagtatcaaaaatatcagaactaaaagatgcctctttgagttattcctccctgtcagggtgggaagaacggggcaagttaccggcattcttggagctgacccgaaaagtttggcgcacccgcgcctatggggacttttattcctatatgttggtggccgaaggggtagtggacgccgcggcagaaccagaactggaaatctacgatatggcggcgctagtaccgattgtggaagaagccggaggacgtttcacctctttgcagggtgaacctggatgtcaaggtggtaacgccctagcaactaactcccatctacaccagcggattttgactatgttgggaggcaagtaagcgccggaaagattctactcgccgcagctgcgccggatcggtttcttctaaggcgctcagctgacatcccggcgaggatgctaagtgacggcaaagtttcgggcagccggtggctacctccgctagatccgggaaagcggccagcagatcttcttcgccaatatgtgccagcccgaaggaacgaatcccgggagtatcaatcatccatccgccccggaaggggagtgccataaccgaggtggaagtgtggcggccgcgtccggttacctgattaacttgcccaatgttgcgttctgcctgaggaataagcgcattcatcagtgaagatttaccgactcctgagtgtcccaccagcacgcttacccgtccagatagcagatcagctgccttatcaacaccttgcccgctctctatactggttaccacgctgggaacctccaatggtctgaaaagttctagtagcggctctggagaggtgagatccgatttagtaactagcagcaaaggttctattcctgcgcaataggcagctaccaatagtcgatctatcattcccgggcgaggcggaggatcagcgcaggcggtaacaatcgccatttgatcagcgtttgccaccatgggtttttctttagctcccgggctatcttccgcggagcgagtcagctctgttttgcgtggtaaaacctccacgattcgcgccagggaaccacttttaccgctcaaatcaccggtgacgcgcacttggtcaccgactatgattccgtgacgtcctaaagcccgagcctttacccccactagcttggtttgccccatttgtacgtgaatgcgaccgcgatctactgcataaacaaaagctgtgggactagcagaatagtcgacttgtttttttgagcggcgcggtttggaacgagcaggacgaacccttactcgaggatcgtcagttccgatatcacgccaagccattagcaccggccagcatggcttcccaagttgcagtgaaatccgggaaagtcttacttacacactcaatatctgcaatctgtaccccgggaacttgcagtccgattaaggcagcaaacatcgccattcggtgatcgccgtaggtttttaccaaatcgccgtgcaaaggcgtgggagaaatcgtcagagagttttcaccggcatgagcctttccacccaagcggttaatttcggtttcgagggcgtgtaagcggtcagtttcgtgtccgcgtaaatgcccgataccagttagtttggagggagaaaccgccaaggcacaaagcgccgccaaggtgggagtgagctccccgagagcttccaggtcgctgcgggttccccctattacgccctgcccctgacataccaaggttccttccggggtgcggtagatacgagcccccataggggatagtagttgccgccaagcatcgccgggttggaaagttttttctggccagttcgggatactaacctgccccccgcacaccaaagcggctcccaggaaaggccccgcattagtcagatcgggctctatggtctgctctccaccgctgagttgcgctggtttacagcgccaaaggtgccgaagctggcgagtgttccagtccccggattcacccccaatattttcaatcgccccgccccgggcatttacttccgcaaccgtcatttctacgtgacgaatagagggtaaaaccgagtccacctcgacttgcatttcaaagggaagcgccgcggagacaagtaggagagccgatacaaactgggaagaggcagcggcatctatcttcacctgctgcagctgatcactgggagttacctgcccgcttatagtaaacggtaaatgtcccggcacgggcatatcagtaatttcggctcctagctgggtaagcgcatctaagagacctttcatggggcgtgcgctggcagccgcgtccccttgaaaacgtaccgcttggccactaaggagcgctaccggcgccaaaaaacgcatcaccgtgcctgccagaccgcattcgattaccccagtttgggggcagagcttagcaggcggagtgattaatattccgccggattggtcttcaacctgcgcgccaaactccttgatacccgcaatcattagctcggtgtcgcggcagtgcaagggattagttaagaaagttggttctttagccaacagcgctaaaaccagggcacgggcagttagggatttagagggaggaagagaaattaccgcatctaggggtttgttttgagcaggggcgttccaaatagtcacaagttactcctgcctgcggggaaaaatctcggaagttagaccggcgtggagggcgagcccttgggcgatcctaaagacatcaactttgtctcgctgccagccgtttacaatggtggctgcaccattagccaacactagagcggcagtagttagaggagagcgacgggtggttgccatccgcagtgccaacagagtcactgccactccacacactttcgccatggttttaacatcgctcatggttaagggaggaaatccgtttttctctataagttccaggtgatattgggcaagctgcgcatgtttatcgctgttacgcaccgcatcgattccctcaataattaaaggcgcggcaatcagcgcgcgcgaaaatgcatacccattagccatatttctattcttactcattaccggggcttatttctagcttcctaggttttcttatccgaaactagcagggcggaaactggactagactggaaggtaatggaaaccgataccttagctgagaagttggcggatgcctctttgcctgctgatataggtgattttacccggcaagcggcaccggaaaatgaaggcattacagctagcgcaggggatgagcggacgcacgaagaggaaaaatctgctttagctgaacgtttttctgctgaagccttaccgctgctagatcagctctatgcgggggcgcttaggcttactcgcaaaccggctgatgccgaagatctggtacaagaaacttatatgcaggctttccgcaagttcaaccagtaccagccaggtactaatctcaaagcctggatgtaccggattatgacgaatactttgctcaaccagtaccgttcgaagagccgcaggccacaagaggacggaaccggtgagatctctgatcaggcacaggtagctcagtcgttgcatcatcaggtgggaatgccttcggcggaaaccattgctttggagcgcttgcctaatgaaaccatccaagaggcctttgagaagctttcagatgagaaccgtactgcggtgtatttagcggatgtggaacagttcagctacaaggaaatatccgagatcctggggattcctctgggtacagtgatgtctagactgcatcgcgggcgtagtcagttgcgagaagaactagccgaatatgcccgggaatatggaatcggggtgaaacgatgagcgagcaaccatgtcagcgtgatcctttccggcgtgctgccgaagagtgccgcgaactaagcgaggaagaggctcgtcacatttcccgctgcccttgttgtcaaaaactgctcgagggcgaagccgccggtatttccttatctttacggcgttgcctgtgtcatggaaccgtggcgcctgctactttgcgcactcggattgtgcagagtctagcggtatatatgcaatcagacgggatgcaagtgtcttatagggaagaacgttttcgcgaagacctgtaaatattgcattagctgtttttagagagggtgaaaagcgcctgcttgatccttagttttagggcgtcagtttccaaaaccatgggatggtgtgtaaaactagggacgttgatttttatttgggaaggtgtttgagatgtctaaacgtggacgtaaacgtaagagtcgccgtaccagtgccgccaatcacggcaaacggcccaattgctaagcaaaagcatttaactaccgctaaatcctagcggtagaaacttttggggggttggatgacttttagtcatccaaccccccaaggagttttttggtactgaactaggcgaaagccttctccattagttcggcgttctcggctttatgcaacttggcattgcctgcagcgggagaggcggcttcgccgcgcgacaccacctgcagactcttgccgattgctgccggaagatgcagagccatgaacggccaggcaccctgattttccggttcatcttgtacccaggtgagcggtaaatcaccccaggcgcccagaacttcctggagctcggctaccggcagcggataaagctgctcgagacggacaatcgcggtatcaaaacgatctcgctttgcccgctctttcaccaggtcatagtaaacgcgaccggtgcacaagatcactcgcgaaggctggctgacccgctcatcgacttcgccaataaccggttggaattgtccggaaatgaagtcctcgaccggggaagccgctgccgctagtcgcaacagttgtttcggttcaaaggcaatcaacggtttgcgcgggcgccggtaagcgtgagtacgcagcatatggaagttgttcgcaggattcgaaggctggcatacccacatattgtcttgggcgcatagttgcaggtagcgctcaatacgtgccgaggaatggtcagggccttgaccctcgtaaccgtgtggcagcagcatcactactccggaacgctcattccacttttggaaagaagaagaaacgaactcgtcagtgactgcttgtgcacagttcgcaaagtccccgaactgtgcctcccaaagtacgagggtttccggagactctaccgagtagccgtactcgaaagccaggggagcatattcggacagtggagagttatagacccggaacgtggcctgatcttcggttaggaagttcaacggcgtccattcgcgaccattctggtaatcatgaattacggcgtggcggtgggagaaggtgccgcggcgggaatcttgcccgcccaggcgcacattggtgccctccattaacaaggaaccgtaggcgagcatctcgcccataccccagtcaatcttgccctcccgagacatggtttcccgcttttgcagtaccttcataatcttggggtggggagtgaatttctcgggtatccgcacctgcgaatctccgattctttcgacttcttcacggctaatcgcggaggtccagccaatcatcatcccctgtccgggctgttgcgaggagggcattacccagcgggtatctccaccagggttggcagtatcgtcatgttcttcggcgtcgaactctttcttttcccgggtttcctggaaaatcttgttcaaatcatcatggtattcctgcagtgcttcctctgccttttcttcactcaattccccgcgcccaatcaggttgcgagtataaacctcgcgcgtggtcggtagccgatcaatcaaggaatacaacaccggctgggtcatcgagggatcatcgccttcgttgtgtccacgccgccggtagcagaccatatcgatgattacatctttatggaactcttgcctaaactcgaaggccagcttcgccaccttcaccacgtcctgcgggaaatccccgttaacgtggaaaatcggaacctgaagccccttagccaagtcggtgcagtagcgggtagaacgtcccgaggtaggcccggtagtgaacccgatctggttgttgacaataatgtgtacggttcccccggtgcggtagccgcgcaattgggacatgttcagggtttcttggactacgccctcaccgataaaggcggcatcgccgtgaatcagaatcggcattacctggtcttctgcctctttacctccacccatgcgatcctgtttggcgcgggtgattccttcggtcactccattagcggcctccaggtgggaggggttagcagtgagggatattagtacgccctcgccctcctcagcggaataaataccctcggtacccaggtgatatttgacgtctccagaaccctgggtagagttcggatccaggtagccttcaaattcggagaaaatttgtccataggatttacccgcaatatttgagaggacatttaagcgtccgcggtgagccatcccgatggtgatatctttcaaccctgcgtgggaagcgttaaacagaatattgtccagcagcggaatcagagattctgctccctctagcgagaaacgcttttgtcccacatatttggtttgcaggaaagtttcgaaggcttctgcatggttcaacatactgagaacatgcatctgctcattcttcgaaaacttcttagccggcttctcaatccggttttgcacccagcggcgttgcaccggatcttgaatatgcatatattcgatgccgaccgcctgagtataggtggcgcgcaggtgttctagcaggtcacgcaagttcatagtgtcgcgaccggcaaatccacccgtggggaagacacgatctagatcccatacgctcagtccgtaagaaccaatagacaggtcggggtgacggcgcagaatctgctgcagcggatccgtgttggcggccaagtgaccccgggaacgataggcgtgaattagttcagcaatccgggcgggcttacctttctcagttaccgcgtcatagctgaaatctcgctcccactgatagggctcgtgggcgactcccaaagttgaaaatacccgctcatagaacccgtcgtggccagctagtttttgctcgacaatccgcagaaactccccggaccctgcgccttgaataacccggtgatcataggtggaagtcatagtcataatctgaccgactcccgcattagcaagttgcgagggggaggctccagcccattcggcggggaaggaggtagcacccaccccaataattgcgccctgaccggccataaggcgaggtaccgaatgtttagtacccaaagtacccgggttggttaaagtgacggtgccgccggcaaaatcagcaggtttgagggcgcccgcgcgtgccctcttaaccaggtcctcgtaagcatcaatgaactgtttaaagttcaaagtgtcggcatcgtgaacgactggaaccatcagtgaacgggaaccgtcctccttgggaaggtcaatggctagcccgaagcccacgtgtgcgaacttgcggatgcagtcccgcccgtcttcgtccttttcgaagcgaacattcatggacggcatttctaccagcgcctcaataatggcgtagccaatcaggtgggtaaatgagaccttgccaccggtggtggctgccaaatgggtattaattacctttcggttttcaatcagcaacttggcgggaatctcgcgggcagaggtagcggtaggaatcttcagcgattcatccatattcttgaccactgctttggctactccgcgtaaccgttcgacctggtcttcctccccgccaggaccgccgggtcctaagtcgagggcagtttcccgcgctacgtagggagaagttggctccgaggctgccactgggggagccggaggcaagtctgagcgggtaacatctcgcccgctaactgcggaacccgtaggggttacctggtgaggttcagctgttttggattccggatccttgatttgtgcattgcgagcctctagagcggcgaaatattctcgccaatcctctggaaccgacagggggtcggcgcagtatttgtcatagagttcatcaatgatctcctggttgatcgggcttaccgactgatccatttgatcttccgaattgggcatggcgcttccttttctggatggtgacaaagtgtccactaagatactaagcctaaatagttctaaagtcctagcgtttctcttgatattgagagagtttatttaggctttactaatattggtggattgctattaaaatagcttacggattgcctacttgaagaggtgtttgttgtgcgccctaaccccaactatcgggtaatggtggtgtagttgcctgcgagcatttactacctgctaatggtgcttttgggcgtgttgctcaccatcggaaccgccctatttgtggcggctgaattctcgatggtggctttagatcctgcccaggtggaagggcgagccaaacgtaaagaaaaaggcgctgcgggagtgttgaaatctcttcgtcacttgtccacccagctttccggggcacaggtcggaatcactctcaccactattcttttgggatataccacccaaaatgcgctcactgcgttatttgctgagctattgcaggacgttaaaatggcggcttccctggccacagcgattgcagtggtggtggcgttggtactggtcaatgccttttctatggtgttcggggagctgttccccaagaatctggcgctagcgaaacctttcgaagtggcgcggagggttactccgctgcaacgagggtttacctttttatttaaaccaataatcacggtgttgaacgggctttccaaccacgtcgtgcgcgccctgggggtagagccaatggagcagctgtcttcggcacggtcggcctcggaattggcggcgatggtgcgtcacagcgcagaagaaggtaccctcgatctttcaactgccacgatttttacccgctcggtgggcttgggcaaactttgcgcccgggatgtgatgaccgatcggcgccggatggattctttagaagccggacaaagcgccgaggacgtggtggaactttcgcggagcacgggacattctcgtttcccggtactgggggaggatgcggacgatatcctcggcctggtgcatttacgtcgggcagtagcggtgccttttgctaagcggaaaaatgtgccggtcactgcccaacccctgctggtagaagcacttcgagttccggaaaccgtacgcttggcgccgcttttagtgcagctgcgagccgctaatttgcaaatggcgattgttgtcgacgagtacggcggtacctgcggaatcgtttccctagaggacgtagttgaagaaatcgtaggcgaagtggcggacgaacatgatctgcggcggcgcggaatccggctggaaggaaagaataagtggctggtcgatggggatctgcgccccgatgaaatcgctgaccaaatcgatgtattgttacctgatgatggcccttatgaaaccgtagccgggttaatgctagttattttggggaagattccccaggtgggggagagcgttaaagtgcgttcgcacactttgacagtggcgcggatggaaggacgtcgtatagaaaaagttttaataactgcggcagcccagccaactacttctgaaaatgcgcaaattccgagaaatcttcgccggattaaaggcggcgaacaggatgtctgattggctggctttattagtggctttgatcttgctggcagctaacgcattctttgttgccggagaatttgcagtcacctcaacccggcgctcacaaatcgagccccttgccgcgcaagggaaacgaggagccaaggcagctctatgggcggtagaacacgtttcgctagtattagcggtaacccaattggggatcactttggcttccaccggcttgggagcggttgcggaacctgcccttgcccatttgattgtacgatctctgaaattcttcggggtgccttcttcgctcacccacccgattgcctttgtgtttgcgctagtgctagtggtctttctccatattttattaggggaaatgattccgaagaatctcacagtggcagctgcggtgcgggtttgcttggtaatctccccgcatatggtgcggattgcccgcgcggtgcgtccgattgtgcatgcgttggattccaccgctaactggttcgtgaaactggtgggggttactccccgctccgaggttgctcaatctttcacggttgaagaggtagccgcgattgtcgagaaatccacggcggcagggactttgcgggatgacttagggctgctatctggcactttggagttttctaaagaggacgtacgttcggcaatgattccccgcaaccgcttggttactttgacctggccactttcggcggctgattttgaggccgaggtggcgaaaaccgggttttctcgtttcccaatcagcgatgaatccgggactctgctggggtatttgcatattaaagacgtgatttttgctgattctgttgccgcgcgcgaggctcccctagaatcctggcggattcgcgtcctacctgaagttgccccggatgaagaggtggaggacgccctgagagtaatgcagaaaaccggggttcacttggcgaaggtaatggaaaacggtgaaaccttgggggctattttccttgaagacatcctggaagagctggtgggggaagtccgcgacattatgcagcgtaacgataactagctaaaagaccttagcatttagttaaaaatcgtaatgcagatatctgtccctcgttatactgggtaatcatattgttttcccatcaatagaaagtctgtggctatggataggtgtccccgttgtcagagtgtgttttcagccgaaagtggttattgccaaaactgcggatatcgtccagatagccagttttcgccaggaaatgatcagacgagaatggtggggcaaaacagtgcaggagcctctgcctcacctgtggggagtggtcagcctgtgggctctccggtaccgccggtagctcccgtaccgccggtggctcctccagcaagttctgccccgggctatgaatcacagtcgtggcagcagccggtttacccgggggcaaatcccgggaaaagcgggggcgctccaagttattatccgccttctcccaatgggggtaacgccggtggggatgggaacttgccggaaaagtggtatcgcaataaaaagactttattgacggtgattattggggcggtagcggctattgctttggtttccgggattgcctgggcggttagtggttcccctaaaccgaaacccaccgtcgccagcagccccagcagcgaaaccaccagcgaaacccctactcccgagattacgcgagtggagctgcctgcggaattcacgggtggagagaataaatatgattccaattggcgatggcaggggggagccatggttacaaagattgagcaccaaggggaggtaaagagtcgcaagttttattttcaagtgtggactccacagttgaaagagggagcagcggcatgcgaattttcgcccgctcaaggtggagaaaagacaaccgacaacgatattacggtaactgccacctacggggataaaccgacggtttttgtggtttatacgatccttaccaaggcggtgggaacttctccggaaactgttcacctctatgcccaagaactagagttgccgtcgtgtacggctaagccccgcatagacctgcaaaccgaggccgataacgtggtaaatgatcgacaagattatgactacgaagtgttaggtaggtcagaaaaaagtattgcggtagccaagagatggattactcagcaaccatctgataccgatgagacaaatctatatcatatacaagttatggcgataactgaggggcaggctaaagctaccgcgctacaggaagcctctggcagtatatatacgctcgttgttcgtaccagcaataccaatgatatctatgccattgctacggataaacgtcgtttttattcaattgataataataaagttatattcgaacttcccttagattttgaaaatgggatgacgagttgcaattttgagacatcaccccctgatggtgacctcgctttatttaggctcagctctgaactgtatttatatagctgtgagggcgaactagatggtgataattacgttgggggtacgtatatcgttaactccactaacgcgaaaatgactcctcttactagtttgactaagttttcttccgatgtggactaccagaaggcgcgttttcggcagtttaaagatggatccgtactagttaccagttctgattttatccaagcatttttagtgggtaccgacgggaaggtaagtgagatattagaccacgcccagtgggaacggcttttgcataaccaagacagtcacttcggagatgttaactacctaaacaaccagttctatgtacaaactaccgatgaaattttagcgatggatttgaccggcaaaagcttgaaaaccctaacgatggagccaaatatagcttctctaaagatcgatgcaactaaggttaaatggattgcctggcaaagcccggatgataaatataaaaactctgtgaccctaaccaccggcgctttgcctgatgaatcggaggatacagactagctgggctatgtcctagggataggtgatgccctcccaatcaaactttctgttttctagaaagctctcttctgtgcagcgtgccttaacgccattgttgggggcggtaaaacggttagagcatgctttcggttttgaatatggcgcaatagtaattgcccgttctggataaaatgttacaaattcgttatcatttcagggttggttaattttcccggaggaagtacgtatggtgcaatcggctacgcctagaggttctcgccgtgcagaacgcgtacgccggcggcggctgcagcgctttgcagccattccccgcgccctggtgattttagggttagccaccgttactatcgttgctccgctcaccggatttgtgcaggctcaaaaacccggactgatgaccgcgcatgtgctctccgttggagacggctctaagagctgggcagagagcccgaataagttggccagtggagacctagagaccgggttgatacctgatcccgcggccaatactcgcgcgcgtattttgagcgcggatcctcagtgccaattctctaacgtaggttctggtaataaaggctccgaactaatggcgaacgagggcgcaatcctatttcccctggagcgcggaaccttccagcaaacctctccctttggggagcgtatccatccgatttctggaatccgcaagctgcataccggaaccgattttgccgcgcccgccggcaccactatccacgctatgaccgatggggaagtagtctttgtcggtcctttaggtggaggcggaaacgcagtccgagttaaacattcaattaatggcaagattgtttattcacagtacaaacatatgttgaatggatcgtttagggtcgcggtagggcaaaaagtaaaagctggcgaccctctcggttcagtagggtcaactggaaattccaccggtaaccatctgcactttgaaataatgccagatcaggaagaaaactacatagatgccgttccctggctagaatcccacaacttccggtatatagggcaaaaatgcaattaaaaccgcaggtgattgcccatcgaggcggcggtggggaaaccgttgagaacacccgggaatctattctttatgcggcctctttgaaagttagccgttttgaaacggatgtgcgcgccctcaaagacggaaccgtagtcctgcaacatgacgtgcagctgaaaaatccctggggggattcgcgtgaagttggggaacttacctcccgcgaatactttgatcttcgcggcccacaaggtcagcgtccgatttcgctaaaaagcgctctggaagatttcccaaccctcgcctataacgtcgatattaaagagcctcgcgccctaccgggggctttgcaagcagttaatgatgcggacgcttgggagcgggtagttttttcttcattttctactaagaccctgcgcgaagtacgaaaacggcatccctatgcacaaacttccctgtcgccgtgtgaagtcttaaaagcagttatcgctgcccgcactgctgatacccagttacttcaaatttcgggagcctttgctcaggtacccctgaagtggcggggaatcactattgttgaccgggcatttgttgcctggaaccataagcgaggaattcgggtagagccctggactgttaacgatgagcaagaaatgcggaagctggcgcgcctgggtgtagacgcgattatgactgactatccgacgcgtctaaaagcggtgctttccacgatgtagttagccgcgccctggtagagttgaggcatgagaattcatgtagcctgcgatcacgcagcatttgacctaaaagaagcattggttactcatcttcaagatcaaggtcttgaggtaatcgaccacggggctaaagaatatgatgcccaagatgactaccccaacacctgtattccctgtgccgaagccgtcctcgcagatgagggctccctgggagtggtactcgggggatcaggcaacggagaacagatagcagcaaactgcgttaagggaatccgggcagctctggcttggagtctggaaaccgctaagctagcccgccaacacaataacgctcagattgtggctgtgggagcgcgaatgcatgaaacctcccaggcgctggccataattgatgctttcattgcggaaccattctccggggatgagcgtcatcagcggcgcattgatttaatgacccaatatgaacaggaaaaatagttccccagtcaagcatctagaaatccccagggcgtgtctgaacgaggtttattaccctggggataaaagcagggaaccgctgctggcgggggtaacattcacggttaggccgggtgagatgctggcagttattgcctcagctcccgtcaataccgccttagtaaacttgatttccggtctggataatctccaatcgggcagtattgaaatcgagggacaagatctaggggaaatgagtccccagcagcgagcttggttgcggcgagaaaaggtcggcatagtaatgccctcgggaaacctagtgggtgggttaactgtcgccgaaaatatagcgctggtttatgaactttctgggattcatcaccaacaggcgctttcacgcgctggggtagctttagcaaatgttcgcgcctctgaaattggggatcactatccccatcaactaggggttttcaaccagcaaaaagtggcgatagccagagccggactcgggggagcgaaactgatattagctttcgacccagatttagaactagaacctgaaaagggagagcagattttggatctgctgcgcaagcaagtggaaaagggcggttcttgcttgctgcttaccgaacgagaatcactagcaagtttcgctgatcgctccttgaaaattcagtccgcaacggtagctgtaggggagcaggataatgactagagccggtttgacttggagattggcttacaaaggtctcagccgtaatgctcgctatacctggttagtatttactctggttgcaatagcttcttgtctcatgactgtggtcacgatctcgcaggtcacccgggatccgatggtggcttctcctcaagaggctgtttttccggcggccagcgccgcggtggtgtaccgtccgaagctcacttggcaacaagtggacggtctcgagttttcaactgtagacggacagcggcaatgggaaatcggggaaggggcaaatccttttattcccgacaatcaagatctcgtaaatgttctaggcaaaactcggctggaacctctgattttcgcctcgggaaagtttatgcctgccagctctcaggcagatcgcgcagatcttgcggggctggctggaaactggcaacttttagatccgcttgcagatacggtggtaaaagggaaaaatccggttaaaattgacgaaatttccttaagtcgcaaaaccgcgaaacagttgtccttaaaagtgggggaggaaactttcggcagtaaaatctgctctgctaacacttgcctaaaggatagaaaatatcgggtggtggggattttttcggcaccgcacagccattggcaacagtttcgattggcgacaaacgcaaaaaatagtttccttaaatcctccgctggctcagaaaatcaggaagttagacctagctggccattcgctaaacttaacgaccaggaaaagaaatacccttactttatttactccttccaggtattagcggatactgatatatctccagaacaaagaagcaggttgaatactgcgcatttgcgggttatcaacatttacgatcagccatattgggattttgaagcgattagtttcgcccagcgcaccttgcttttcttacccgcggtggcagtctacctactgggactattcttccttaacctgccggccatgaaccgtctggtgtttagacaacgcgagagttttcaagtgctacgacgtgttggcgcttaccctcatctaattccccaagttttagcagctcaagctatattactggggataggtggaagtgccgcgggcgttatagttggctacgctctgcaacaaatcatcattagtcccgatactggtgcgcctcatatcgtattattcttcctagctttagcggctgccctcggggttttgtgctgcgtattagcaatgctccgggcgttgaaaaatacccggaaaagtcagcggccgataataggtagatagagaataaacccgggattaaaacctttatacctggcgctataagagagggcggggatagcaaacgccccatccccgccctctagaacagctagagtttttttggttataacttaactagcgagtacacctgttgtgcaatcgcaagctcctcattagtgggaactaccagtacctttaccgttgaatcgggggtagagatgattgcttcgcgggagaaatgttctttattgacttccgggtcaattttcactcccataaaggcgaggctatcgcacagtccggcgcgaaccccgggatcgttttcgccaactccggcagtaaaagtgagagcatctagcccgcccatgactgcccaataggcacctacgtacttgaccagacgatgcagatagatttccatcgccattgaggcctgctcatctccctctttgattagcttccagatctcacgcatatcgttatggccggtgaggcctttcataccggagcgccggttgaagagttcatcgatttcatcgatactcatcttgccttcccggtacaggtggaacactgctgccgggtcgatatcgccggtgcgtcctcccatgactagtccctctaacggggttagtcccatggatgtttccaccgggtgatgaccgataatcgccgatgctgacgccccgtttccaaggtgtaaaacaatctgttttagatcggaggtgcccaagatagaacgcactcggtgggcaacgtattggtgggaagtaccgtgcgcaccgtaccgacgaatccggtatttttcggcaaccgatcgtttcagggcgtaggtgtaggccttttctgggaggtgattaaagaaggcggtatcgaataccgccacgtgcggaactttgggcaggattcgtttagcagcatcaatccctttcaaatgcgcgggattatgcaaggggccaagggggcagagttcctcaatcagggagtacacggtcttatcgatgacggctggtccagaaaaataggggccgccttgcacgatgcggtgacctaccccgactacctgggaatcttcaagggagggaccgattttttcaaaaaggtcttcgacaaccgccattccctctaggtggtcacggactggctggcgcattttcttttctttatcctgatagacgtgcttgatgcgactgcgatcctcgccaatttgttcgacgactccgtaagctatttcttccccgctttccgggttaatcagcttgtatttaattgatgacgaacccgagttaatcaccaggatggtatcgttttccatactttcctcctcctttaggggattattcctgcgcctggatggcagtaataatgatggtattaacaatatcggcaaccaatgctccgcgcgagaggtcattgaccggtttatttaatccctgcaaaataggtccgactgcgacggctccggcggtgcgctgcacggccttgtatacgcagtttccaacatcaagatggttgaacacgaatacgctggcctgcccagctaccggagagtcggggcgctttgtggcggcaactttccggtcgatagcggcatcaaattgcaaggggccatccaccgccagctcggggtgattttctttcaccaatttgacggcctcagccactttagtaacggtttctccactgccagaatctccggtggaataggaaatcagggcgactttagggtcaataccaaattgggcagcggttttggcgctagaagcggcgatatcggctaactgattgcaatcagggttaatcgaaaccgcacaatcggcatatagatccgcatgatcagaaaacagcattaggaaagccccggacacggtggaaacctcgggcttagtcttaataatctggagggcgggacggatggtatttgcggtggtgtggcaggctcccgacaccatgccatcggcgtcgccgcattcgatcatcatagtgccaaagtaggctgagtcttttagcagttcgcgtgctttttccggggtaactcccttgtcggatcttaattcgcttaggcgttgaccatagcgttcaatcagggattcatcacttaaagaaactactttagcgccacttaaatcaagcttgagtttttgagcgcgggcggccacctcgccctcttcacccagaaggattattttcgcggctgacagttttagaatctgcgcagctgcctgcagtacccgatcgtcttcagattcgggcagcacaatagtgcgcggggcagctttagcccgctcggtaagcatcccctgataggcaagtggagggatggcaacacgcggcggattttgcagtatcgggcggaggttttccaggtcagcggcgtctactttcgatccgcttaccgtggctaccggagcatgctccaagcctaccgaaggggtgaaagtggcgttgattaaaattgttcccgcaggagtgcccccgtgacgagaagcagttaacgccataatacggctggcattgatggcggcttcctcatccatcccggaagcgtcgatcaataaaatcatgggtgccagcaggtgagcggcggcgtgggcgtgaacctcggtgatatctagactggctgatgtagccgagtaggtaccgtcatagaggacatccccagcgttactaaaagtatcaattacttgctgcgccgattgttcagatttgagaatccattcttctggcgaaggtaatccttctttaaaaacttgatggatcggggaatttcccagaagctgcgctaaggatttagcgacactctcggtatcagtatctgcctgtaaaggagctagataataggatttgttcattggtgaccttccccttctgctactttttcagtatctccacagccaggctatcaggtaaagtgatagtaaacaatcagtatataacaagaatttctagattttttggttaaaagttcagcgatctgttgaagacccctaccttcaaaaatcccggtatgctgggatacgtgaatgaatcaagtcctaattgggttcgtcctgtcctcgttttcgatatgggtgcgcaaaccgcccagttgattgcgcggcgggtacgggaagcccatatgtattctgaaattgtttctccgaagctatctgccgaacagattttggcaagaaaacccctggcattaatcgtttccggggggccgaattctgcatatgtagacgattctccgcatatcgatccgcagcttttagatagcggagttccagttttaggaatctgctacggattccagatgctcacccagatgttggggggcaaggtcgcgagcgcggggcgtcatgaatacggcaaggccgaagctaaagtcgctactgactgtcccttgtttgcggatacgcccgcccagcaagtggtgtggatgtcgcataatgatgaggccaaggcgctgcccccagaggcccaggtagtggccagttcaccgggggcacagattgcggcgttcgaagttaaaggacgtcccatttggggggtgcagtggcatcccgaggtgcgtcatagtgaatacggtagccagctaatcaagaacttcctgttcaaagcagccggtctggagcctaactgggattcgcactctatccaagagcatcagattgagcagattcgccagcgggttggaaatgcgcgggtgatatgtgggctgtccgggggagtggattcctcagttgccgccgccctagtgcaccgggcagtaggcgatcaactgacctgtattttcgtagaccacggtttgctgcgggctggcgagcgggaacaagtagaacgtgactacgcggcctctagcggggtaaaaatcgtcaccgttgacgaatcggaacgcttcctcaaagctctggttggggtaaaggatccggaagaaaaacgcaagattattgggcgggaatttattcgcgccttcgaggatgcccagcgcgccctggttaaagaagctggcgaagccggagaagaaataaagttcctggtgcaaggaactttatatccagatgtcgtggaatctggcgggggagaaggcgccgccaatatcaagtcccaccacaacgtagggggattgcccgatgatctgtctttcgagttgattgaaccgctacgtagcctgtttaaagatgaggtacgcgccctgggaacggagctggggttgccggataatctggtgtggcgccaacctttccccggtccgggcttgggagtgcgaatccttggggagctgaccaaagagaacctggatattttacgtgccgctgacctgatagttcgtgaggaattgaccgctgctgggctagatcgccagatttggcaatgcccggtggtcttgctggcagatgtgcgcagcgtaggcgtgcaaggcgatgcccgtacctatgggcatccgattgtgattcgcccagtcgttaccgaggacgcgatgaccgccgactggttccgactgccttacgaggtgttagagcggattactaaccggatcaccggggatgttcccgagattaatcgggtggtgttggattgcacctccaagcccccggggaccatcgagtgggaatagctagaactggcttctggaatcgcgttttggtgccgatacaggagattcatccgttctagacagcaaacggccgagcggttcgatttcgctcggccgttatttctctaacctgactgacgttaattcaggaagaaatcgtcgacctcctcccgcgtgtgcaggatttcgccgtccgggacattaaggcttgtcgccaactcaatagagccggagaaagccatcgcgagattcggggagaaagcctttccgaggaggctgatgtatgtgctcatattctcacgaagatcatcgatgcatgcggcgtattcgccatcgagcttctcgtcgagggcctccagctcctgagcgtaatgcgcgaggatctccgcctcttgtttgctgtagaagtcttttcctagctcgtacatagtcgtgcctacggcgttgccgataagggcgcccaggattgggatcgggataatagtctgacccaggaagcttgagaacgcgctcacggacgcatcgaggcacgcgatttcggagctttctataaactcgatctccgtaagctcgccgttacggaacctgtgagcgcagtcagcaacaccgaaagatgccgttaccagtgcgcttgcgacagctgagggtgttgccgtgtagttgtttagcccgtaaacagctccgccgcgaaccccgcccttgacgagccccatgccggaatctttggcaatctcatcccagtcctcttgggtcaagtcgccgatacgcttcccgttcctaaggtggcgcttcactgagaggacgaatgtcattcctgcctccagaacggcgccagccgccgcagccttcgcaccctctttgggcgtaggcttgtgatcctcgtagatgcccttctttattcgttcgctctcgtccgctagcttgctcttctcctcggccatcttgtcggcgataacgttcttctggacctccgagtactcgaatttagaggcttccagatcatcgatgctgaacccgcttgagtcgaagaactcatgaatgctcttccaagttgagtaggatggaccgccatccgaggacaccaacttggctgcttcctccttgggcatctcgtacaggaagcgcactgcctcgagatggtccttcgggatttggtagacgccgtttttgtcgaggaaatcgggatactttctcaaatgggcggccactgcgtccagggaaaacttgccgccggcgttcacgaacttgacctgtatggggacgccgttgcgcacaaggtcggcgggtccgttgtcgttcacccattccattaccggtttatcgccgcggacgaggctctgcgcattctctaatccgcattcggccacctcggcgatgaagccatggacgcccttgccgccgcccctgttggcaacgacgaggttctcgatcttctcgagcgcccagttcatggaccccattgcggaatcgaggtttttattttgccggttgagcccctcgataaggtcatcgattctcaactggttgatcaatccgacccatgcggctatggcctgctcctgggagctcttgagtaccttctctgcgttcatggctattcaccgtcccgggcggccaccctctcgacgatgaggctgcccagggactttgcgttgtttaccaaggcacccagggccagtttctcgtcgtcggagatggaaaggtagtcggcgccgtacatgcggcatgaggacataaaggacccggacagctcttctcgaagggtattggtctttatcttaagtgccccgattgctgcggacgtctccctgagagcctcgttgttccgcttcaccgacaggagctcttcgtgcttttccctggcaatctcgtgctgctttttcacaaagagagcgatggaggtcagcaacgtggcgcctgcgacgccccatccgatggggcccgccattgccaggaaagcgctgccgccggccattccgccgcctccggcggccaatgcgcctccgccgagccaggccatcgccgcatttgtcgcggcagcgcccgatagcgtagagatcgcggcgcccgtggaggcggtaccgaaagttgtggcaacccacatggcggcggatggggcgatgctggcaacggccatacctgccgcgacgccggcgccagcgctggctgccgatttccgtgccgagtccagctcttcgcgggcgaaggaccccgactctttgaagcttcgctttttgtgtgacacctcttcgatatcttccacgaacgacttcggcgtgttcgcaatcgagttcaccaggtcggtaacgagatccagcaggtcgatgctcctcagcctagactggtagagctcgatccctcccgatttcagatcggtataggtttggttgtattcgatgacggcgagctcgtactcatccggttctttcgcccttgcattctcgacgccttgcctgaccccatcggcgatttcccccgctttacctgcgacggcggcgacagcgccttgggcaccggccgctgccacgcttgcagcgtttgcggctccttcagccacatctccaagcattttcgccatatgttccggagctagcctttgagattggggcgatccgtcaacgtttcgctcatcggcaaactcagtgttgtatttgaagctcttcggctccgggacgtccttgatcgcatccccaatgctctgaacagcgccctttgccttgcctgcaatgtccccgatagcctgccccgtctgctcgacggcgctttgagcggcattcgatgcctgttcggcaacgcttgcgattccttttcctgcagcggctgcagctttctgtacctcttttattgggtcggagccgttatcgaacaagcccatcgtcccgcctttctccactcgtaatccatggtgattatcccacaatggatagggttctgagcagctttctgaccgcaagtcattctaaattcggaatgactgaccgttgtcgcgtccggcgtaaaaactgctgcgaaggtcctattgaaaaagggctaagtatttatcttccgcattgattgcatcgacgaaaatagtgcgagcggagagccggggaatgagtagcgtacaagctgacctagggagagtggactaatatttgcaagtgctctgctcgatgaaatttacgatgctagaatttgggtattgcaatagtatgaaaggaaatacattgagtaattcaccccattttcagcctgatgaacaagctcaggaaccggacgaatcccaaactaggcttgcctccggtgctaactctggtcctgcgaacagctctttttctccgtttccgggggctccgcagggatcagcgccagctaggggaatgaatcctccacttccgcccgctccaccagcaggaatgaatcctcaatttccgcagggaaattatcagcaaccgattccgcccgctgggtatccgccttacccgccacaaggggtagccggaatgccacagcctcttcctccgtcagcttcggcaccccagggagaaatggtgaggtatccgcaggcgggctatccgtccgcaaccccggccggggtccagtcaccttacgcagccaactttcccggttatccgcagccccggaaatcctctaacgattttgtcctcgcgttaaaagctatttggcctacttttgtgggactgcacaaatctgaaggccaagtccgggtaaaagccaacttccagttgaaacactggtggtgggtaatgatgctgctattttccctgctcgcgggacttagctcttcggtgttattagcccgtagcgccgatattttttcttttggattgctaggttcctcggggtatggaacttatagcatcctatattttgggtattggttgctttgctttgtggtgtttaccctcgtggcattcgcggtagtaattctgcgggcggccttagcatttgcagcagcccgcaacaagcccactgcaatttcatttacccaggtagcttcgatagtggcaacgggtctggtgatgccctccttcgcgttggcattaatgtttttgatttccctgctaccgatcccagttttgactttcgtattaatagcggtcctacaggtgctgctatcggcctccttcctgattatggagctgttgattttcggaagcttaaaagagctatatccgcaagataaaagtccggagatgcggcacgccgttttctttactatctgggcgctatgtgcctccctagtaattgggatgttggcggctcctaccgggacttatgccgtcaaagagagcgcaaaggctgccgtggaggacagtatccaaaatcaggtcgatgacctacaggagctaaagcggcttttcgataactaaactcgctagttttccagtaattatcagataccctcacctacccggatagcgtaatgctagcgcctagttgtattcggaataattggtgatttcaaatccttgtatcgacatttccgatactaattccgggcttcctgacccggtaatgggatcagatccgtagatattcaccctgccggggctaactattttcactactccgtcttgcatagctggtccgattaccgacaaataggggtgatcggggtcgtcgggatcgaaaatcgctagggcgaactcggttgtttcatagtcgtttaaaaccagcagcgcgtccaagtagccatcagcattaacgtccccatatcccactgcataagattttgttggatccggtttgaagcttgcagaatcgaaaagatcgctaatttgttggtccgctagttttatcgcgtcgagctcggtctctggatgctggggcgagaaacgaaacttttccaccgaggacccgtttttcatagttgcccaacatgcactcgttccttcaggcattttattggcaaccggagttctatccgatttttgccagaagttttcgttcggacacttttggtcgctaaagaaggggaggtaggcgttggcgaagtcgatgtttttgatggcgtctttggctacttgaggttcgcttggttgggtatcgactttacttagctgtttctcgggagccgcttgtgcctgggagctgccgtcaagtgccattacctccagttccgtctgttcgtcctcttcgtcatcttctgcattttcgggttccggattctcggcatcctcgtccacatcttggttagcatccagggaggaatcaccaacaacactggtggtataaactgctttgccattgcaggttacggaggcaggttttttcaggttttgcacccacaatagtttgctggttttggggctgtaagccacgatctgcgtagcattagtcgctgaagggctggcgccgactaccagatgcgcgttgataaatatttcttctttgaactggtatttcttattcgtattggcttttattatttccttagtagcgcatacaatttttccgccctttatctggtaggggtattttagagagttatcgcattttggcagcgtaataggccttccgcttttggctccggttttaggatcaagcatttgggcggtgccggttccgtccttaaaaggttgcagtaaaatcagcttgcctttttcgggtgagtaaagcgtataggctaagccgggttcgcccttggtctctagttgaacttttgccggtttttcccaagctggttttacccccaccgctagagaatcatcgcgactaagcaccttgtaaagtactgtgcccaaggcacacagcgcgaccactaataccacgcataaaactatgatcggcacccgataggatttattgttttttatcggctttcctcccggctgaggtacggatgccccaggagctggctgttccgggtaattaggaggcacctgctgtgcagcgggataggacggcggtagctgcctacccgggatattagttgcaatcggctgtcccggatagttgccagcaggttgccccgggtaaaccggagtgactggtgggtttgccgggggataggctcccggggatacaggcgctccggcaggatattgcggataagtttgcgcattacctgaaccttgcggggagggagaataggacgcgcctttatttcctgacatccccttaggggcacccgcccgctgaggagctaacccggaatcaggagttcgagtaggctcagaagatccgtcatttgcacctttatccggggaaaacttcgacataaccccactctaacaagctccagcgttccttaacttgaaatctgaacagttaactaaaaggcgctaatcttgcgacagcaatccttgtttagctgaatcggtacagcattggtgaactagctaaaactgctaagcaaaccgcgccaataatcaatcgcttagccagcaaatatctcgaggaaatctccgatactacccggcattaggataggaagatataaagtcggttacttcgtgtcctttaatcgttgtttgtgtttggattttatccattttgcccgatgaagggtttggttcaaagacggttatcgttcccggaggtgttagctcaattcgagcgccttgttgtgtaccccctattactgtcatataggggtgttcggggtcttccggatcaaaaagtgccaagataaaactcgctgcttcgccatcataggctactacgagggcatctaagtaaccatcgttgtttacatcggcgtatccgactccataaggcttgttatcatcgccaataaaactattttctgagtcgaaaagctctccaatttcattgcggggcgtcagcttaacgtcgctgctcaattctcctaaatcgaaggggtcactcttttcactcgattctccgttttgcatagttgcccaacagtggctagtttcgtcaggcatcttattgattattggagtacggtcagattcttgccagatattctcctcgaagcagccgtaactgaccatgggtaggtaggcgttggcgaagtcgatgtttttgatggcgtctttggctacctggggtttggtttcctttggcttgcttttttggggttgcccgagttgtttatcgggggatttttgtgcctgggagctgccggtataaaccatgacatctagcttctgtttgccagtggtgtttgagtttgcagaggtgctggtggtgtagattcctttgccgttacaggtaacggaggagggctttttcaggttttgtacccaaaggagttttgaggttttggggttgtaggccacgatttgccgagcgttagtggccgaagggctggcacctactattaaccgtttatcggcatagattcgttccttgaaatggtattttttattcgagttggctctaaagttttctttggtggcgcaaacaattttctcattctttatctggtaggggtatttaagagagcttacgcatttaggaaggacgataggggatccggttttggctccggttttagggtcgagcatttgggcgatgccacttccatcttttgatggctgtatcaagattagtttgtctttgccagaccaatagagggtgtaggccaaggcgggttcaccttcgggttctaattcgactgttgccgcgttgtcccacgctggttttacccctaccgctagagagtcttcgccggtgaatactttgaacaaagttattcccaggacgcacagtgcgagtactaagatcacgcagagagtaactatcaaacctcgccgcgacttacccttcccgctaggaaccggctgccccggataaacaggaggcacggtttttcccggaatgttaggaggcatcggttgcgatacagggtaagcaggaggcaccggcccagatcctcctggcatcggttgtcccggataggcaggaggaatcggcggagttaccggcggataggcgcccggggctgcgggtgtcgcggtggggtattgcgggtaggtttgcgtataaaccgtgtcttgcggattaggtgaataaggcgcgttttcccctccaggcataacccccggggctgctggttccgcagagacagggctggtttccggcaaacccacagtattagcagcaatagtgtccggggagggctcagaatcaggtgaaaaacgagaatcgccagacccgtccggctcagaactggaactatttacttcttcgtcaggggaaaaattcgacatattcccactctaacaagccccggccgtcctcaagtgaaaatttgaacagttaaacgaacgcactaatctccttgaatcaatccctctttagctcaatctgtataacctctggaaacaggtaaaacttctaaacaagccgcgctaatagtctcttaaacccagtaaatattccgagcaaattcaggacaaatttggcattaattcacactaggaattgtgagtgacaccagtaaaatcatgcccttcgatctcgtaggtggtatggatggcatctgaagaaccgcctttactgtagaagccaagttttccaggagccacaatttttgctacatctggagcttgcatcccgtggaaggttgagaggtaggggtgctcggggtcttcgggatcaaacagagccaagctaaacgcttccgcttcggtgatggtagttaaaaacatggcgtctaggtagccgtcaccgttaacgtctgcgtatacggcgtcataggtcttgctggtatccgctgtaaaagacgtcgaatcaaagaaattaaaaggctcgcccccgtttatgagtcctactatcggttcttgcacaccatctggccagggggcatgagtctcgacagattttccgttttgcattttgacccagcagtggctagtttcgcctggcattttcctagatatgggagtctcatcggattcttcccaaaagttttcatccatgcattcctgcagactaaatgcgggtaggtaggtgttggcgaagtcgatgtttttgatggcgtctttagctacctggggtttggtttcttttggtttgctttcttggggttgtccgagttgtttttcgggggatttttgtgcctgggagctgccggtataaaccatgagctttagcttctgtttgttagcggtactggattgcttcggtgcgaaggtggtgtagattcctttaccattacaggtgacggtggcaggctgcttcaggttttgtacccacaggagctttgaggttttggggttgtaggccacgatctgccgagcgttagcggccgaggggctggcacctactattaggcgtttatcggtatagattcgttccttgaaatggtatttcttattcgagttagctctaaagttttctttggtggcgcaaacaattttctcattctttatctggtagggatatttaagagagcttacacatttaggaaggacgatagggaatccggttttagctccggtcttaggatctagtagttgtccgataccacttccgtcttttgatggttgtatcaagattagtttgtctttgccagaccaatagagggtgtaggccattccgggctcgccctcaggttctaattcgactgttgccgcgttatcccacgctggttttacccccaccgctaaagagtcctcacctgtgaatactttgaacaaagttattcccaggatgcacagtgcgagtactaagattacgcagagagtaactatcaaaccccgccgcgatttacctttcccaccagcagatggccgccctggaaaagtaggaggtaccggttgcgatacaggataagcaggaggcaccggcccagatccccctggcatcggctgccccggatagttagcaggcgccggctgtcccggataaaccggaggaacctgcggagttaccggcggataggcgcccggggctacgggtgtcgcggtggggtattgcgggtaggtttgcgcataaaccgtgtcttgcggattaggtgaataaggcgcgttttcccctccaggcataacccccggggctgctggttccgcagagacagggcttgtttccggcaaacccacagtattagcagcaatagtgtccggggagggctcagaatcaggtgaaaaaccagaatcgccagacccggccggctcagaactggaactatttacatcttcatcaggggaaaacttcgacatattcccactctaacaagcgcggtacatagcaaaacgaaaaacttaaaaaatcagaccagggtgactgaagaacctattgatatttcaagaataaataaatccggtttcaacgctggtagcgatattttcagcgaagtgctgcgacctgctatcaccctggctagcatggaagaggacaatctgaacggcgaccaacgaaaggaaaatactcatgacagttcatgacaatggaccggagccctatagcttcgatctggaaaccgaaaccaaagaaaacaccaactatcgcaccaccgcctggaccgggaaatacctgcaggtaaccctgatgtctattccggtaggcgaatccatcgggttggaagtccaccctgataacgaccaattcctgcgcctggacgctgggaaaggcaaggtggtaatgggagatgcggaagataatctcaccttcgaacaagaggtctctgacggctgggcagtaatggtacccgccgggaaatggcatgacattatcaatgtcggggatgagccgatgaaggtttatgcaatctattctccctcccaccacgcgaagggaattgtacaagcgactttcgcggaggctgaaaaggacgaggaatccggtaaggatgtacctcccgaatggaccgtacagctgggtaaatagtttaccgatgctgaggatgctctagtaacaaccgtggatctggcggttattagggcgaaccttcggtagcagatgaaggtggcgcggctcccaaattttaaggggccgcgccactcttgctatcagatgtttttgaaaatgctgtttaaggttctattttttcgagcgcggcatcgagacgggtaagtttcgcggtcatttccccactacgacctggtcggatatcggctttaagaatcagagctactcgtggcgcaaagcgggaaaccgcttcacaagcgtccttaactacctgcatacactcatcccattcaccttcgatagtggtaaacataggatcggtgcggttaggcagtcccgaatctcgaatcaccttgactgcggcagcgactgcgtcacgaactccaccctcagcgtcggaggtggaaggcgtaatagaaaatgcaactaacatgcttttactttagctcgccgggtacccgaaaggattagcaaaagtactacaaaaataactattgactaaagttgtgaatctaaagggctcagttttgaaagatcagagtcttttccctcggcagtgggagccgcagtaaacgtgacgaataatgctcgccattcctgttatctgattggtacgccgggcgcttaccctgctaggcttaaagggtagttacttactcttggctttctccaagaaggcaagagcaggcagctaacaggctcctcgggcggctagtgaaaccagtggtcagggggatgcggttgggcagtgggtgagaattcagacgacttcccgaatctgcgcgcaaaatttcataccaggcagctatttcatataagggaagactttgaataagcggattttcgtaaggaaaaagaacgatactacccagttcaatgtctatgacattttcggtctcgacgcggctgcattagaaaaagccaagtacacggtgtttgccgaggttaatcaggatgttgtgcttgatcagattgatatcgaagactattacgtcctcgaatatttgcccggccaatttgatcagcgcgcagatgccgccgaaaagtgcctagagttgcaaggttatacagctactgtcaaatgcggatacggacataccggcgaggttaagttcaaccccatcgagatgcgcctcaaagacatgacggtgctggaaaacgagagctatgttcccaaccggcagttgccgcccagcgttgaaatcactgaagattactacgagcaagcctccttggcgatgaccaaggaggatttgcttttcattaaagaatatttcgatagcatcgggcgtctgcccaccgaaactgaaatcaaagtaatcgatacctactggtcagaccattgtaggcacaccacttttgaaactgaactgacagatgccacttttaccggcccctacgcggatcgcctacaggaagaatgggatcaatacctggcggaacgcaacagcaaaaaaccaattaccctgatggatttggcgaccttgtctgccaaacgggaaaaggtaaaaaaccaggaagtctccaacgagataaacgcctgctcggtatatgtaaccgtgggcggtgagcgctatattctgcagtttaagaacgaaactcacaaccatcccaccgagattgaaccctttggtggcgcctccacctgtatcgggggagccatccgggaccccttatcgggacgtaccttcgtttaccaggcgatgcgtatttccggcagcgccgatccgcgaatagatgacccgatagcaggtaaactttccagtaaagaaatcactcagcgggcagccgccggatattcctcctatggtaaccagatcggtctgaccaccaactatgtgaaggaactctatcatccgggttaccgcgcaaaacgcctagaacttgggtttgtagtgggggctgctcccgcagaaaatattattcgcgaagagcctgctcccggcgacttgattttgctgattggaggacgcactgggcgtgacgggatcgggggagccactggatcttccaaaactcacactcgagactcctcccaaacctgcggagcggaagtacaaaaaggtaacccgattattgaacgcaagattcagcgactgttccgtcgggacgaggtcgcgaagcggatcaagaaatgtaacgactttggcgctgggggagtatcggttgccatcggggaactcgctcccggactggaaattgaacttgaccgagtgccggtcaaataccaagggctgaacggtaccgaactggcaatctcggaatcccaagagcggatggcggtgtgtatagatccggcagacctgcagttcttctatgatgcgtgcgccagtgaagacgtagaagtgacccatgtggctaccgtgactgccgagaggcgcctggtgatgcattatttgggagaaactatcgtcaacatttcccgggacttcttggacaccaatggggtgcgttcccacgctaaattcacggcagcatctagcgggcagatcactcccgaacgcactgtgaccggctccgagctgcaggaaaaactggaaaataacctgagcgacttaaacatttgttctcagcgaggactaaacgaaatctttgattcctccattggtgccaccactttgaccctgccctacggaggtaagttccaacgcactccctcccaagttagtgcccagctggtttcagttgaggacgggcaggccgatgtagcctcggtagcggcctacggttttgaaccttcgctggcggaactgagcccttatcacagcgctatcgtctcggtagtgcaatccatgtcgcgcttggccgctgccggggtggattaccgggatctgtatttcagtttccaagaatacttcccgcgcctaggggatgaccccgaaaaatggggaactgtggtggaagcccttctcggagcaaaccgggtgctgcgccacttccatctagcctccatcgggggcaaagattccatgtctggcactttcgaagatatgaatgtgccgcccaccctggttagcttcgctatcgggatgcaagacgcgactaagcttagaacccccgaatttaaagcccgtaatcaccggctctacctgttgaaagctgaaacagatgagctgggagcagtggatttggaatccttccaagcagccctagacaaactgcaagagattgatccgctctcgacctatgccctcgggtatggaggaatcgcagaggcgctagcaaaaatggctttcgggaatcggattggttttgaaatcaaaactgaagaagacctgtttgcttctcgctatggcagtttcctgattgaaactgaccagcacctggatttgccactgctgggatataccggccgctgggcagaaagtgtcattaacggacagcaggtagatttggacgctttacagcaggcctgggaacagcccctagcggagatcttccccaccgccggtaagcgtatcagccagaaaaaagtgacacgagtgagcgaaacttgtttaactaaaacccaccacgcgccctatcgaaagcacaccccccaggtttttattcctatcttccctggcactaactgtgaatacgatatgactcgggcttttacccgcgagggcgcgcaggtagtaaccgaggtttatcggagcgccgcctcctatgctcgccaaatcgagcaagccgatattctggcacttccgggcggattctccgtgggagatgaaccggatggatctgcaaagttcattgtttccgtactgcggcaagtagaagttaaagaggccgtgcattcgctgctgcgtaaagggggcctaatcctggggatctgtaacgggttccaggcgctgatcaaatcaggtttgctgccctacgggcagattcgggatctagaacccgattcccccaccctggcagcaaacgatagcgggcatcacgtcgctaaaattgtgcatacctcggtatcttccgtggcttccccctggatgagttcctttgacgtgggagaagttcaccagataccgatttctcacggtgagggaagggtagtgatgagccaggaggactaccacaagtacctggcatctggacagatagctacccaatatctgggggagaaccccaatggatcttccttcgcaatcgaagggctgttggctcatcagggacaaatcctgggaaagatgggccattcagaaaggagcggtagcggtttatacctcaactactgtcccgaaatagaacaaaacctatttagaaacggggttaattatttccgatggatgtagcaatcatttttggttccgcctccgataaagaaaaaatggcgggcgccgctaaatgtttagacgagttcggattggaatataaagcgtttatcgcttcggcgcaccgggttccagaactattggagcaaattctaaaagaggccgtggactcgggggcaaaagccattatcgcgggagcaggactagcggcacacctgcccggggttatcgcttctaaagtcacgattccagtaatcggagtaccgctagatgcagctctagggggacaagacgccctctattcaatcgtgcagatgcccaaaggaatcccggtttctacggtagggataaacaattcctataacgctgctatgaccgcggtgcagattattggcaccagtaatgagcaggttgcggagcagctaaaagaataccgcgccaatatgaagaaaaagtttactgccgacccagttagtttttaagagaaaatttcaagtaaaagaaggcaaataatggagaaaaaagaattcctgtacgagggtaaagccaagaaaatctatgccaccgatgaccccgacaaggtcattgtttactacaaggatgatgccactgccggaaacggcgaaaagaaaggcaccatcaaagataagggcgtcatcaacaatgaactaaccagctacctgttcgagatgctggcttctcagggagtgaaaacccactttatcgagaagctaaacgatcgcgaacagttgtgctggaaactggatattgttcctctagaggtgattacccgcaacattatcgccggttctatggccaaacgtctgggactagaagagggcactatcccgaagaaaatgatccaagagttctcctataaggacgacgacttgggcgaccccttgattaactcggatcacgcggttgccatcggggccgccaccgaagaggaagttgcagaaatcttggaggtcactgccaagattaaccagattctttcggacgcctttaagaaggaaggcatcctcctggttgacttcaagatcgaatttggacgggacaaggacgggaatctgctgctagcagacgaaattactcccgacacttgccggctgtgggacgcggagaccaagaagaaactggataaggatcgtttccggcgggatatgggtggaatcgaagaagcctataaagaaatcctgcaccgcattaccaagaaatagttattagtgctggttcctgggggcggagataaagcttccgcccccaggaagaaaccactacttagggcaagggaaacacagattatggtcagctataaagatgccggtgttgataaagaggcaggctacgagcatgtccgccggttaaaggaaatggtcgcctccactcaaaacgaacaggttttggggtcactgggatcatttgctgccctatatgaactcggcaaataccagcagccagtcttggtttccggtactgacggggtaggcaccaagctgaaaattgctttcgccctaaaaaagtacgacaccgtaggcatcgacctggtggcgatgtgcgtaaacgatgtactttgtcacggggcaaagccgctgtttttcctggattatctggcctgttctgagcttgatgccgaggtatcttcccagctagtttcgggagtggtcaccgggtgcaaacaggcgggtgcggccctaatcgggggcgaaaccgcggagatgcccggtttttaccaaagcggcgaatacgatatggccgggtttaccgtgggagtggtagaaaagtccgagattatcgatggctcggcgattaaagacggcgatgtagtggtagccctaccttcctccggactgcattcaaatgggttttcactggtgagggcgctctttaaagagccttttcccgaggaactgttgacccctactaaaatctacgttcccgaaatcctctcgttgctggaccaaaaaatcgagatccacgggctggccaatattaccgggggcgggctagaagaaaacgtacctcggattattcctgagggtctttgcgcacggatcgaaaaagaaaaagttcggattcccgccatctttaaacgcgaagaattctcggcggtacctgaaagcgagatgtggggaactttcaatatgggagtgggattcaccatggtgataccgcctgcagaactaccgaaagtaactgccgcgctgcctcaggcttaccaaatcggagaagtcctaactaaagatcaatgcggctcttctgcggaaactcggatatgcctgcgataacggtttgttgttccgggtcgggaactaatctacaagctctcatcaatgccggatgccatattcggcaggtgatttgcaaccgcgaatgccccgccgcaaaccgggcgcgggctgcgaatattcccaccttgattaccgaatcgatagcggtacaagatattgatccccaaagtgaactgatagtgttagccgggtatctaaagatcctttcgccacagttcgtagcggcttttgaaggacgaattattaatacccatcccgcattgctaccccggttcggcggaaaaggaatgtatgggatgcacgtgcatgaagcagtattggcctcaaaagaaaaagaatctgggtgcagcgtacacctggtaactaaccaagtggacgcgggaaagattttagcgcaacgaaaagttccggtactcccggacgataccgccaagtccttgcagcagcgcgtgatgagccaagaacaccagttgctagtggaaatagtgaaaaactgggacaaatactgcccgaaagaggagagggaaaactaatggcaaaaattttgatagtaggcaacgggggacgcgaaaatgcgattaagcgtgccctcgccgaccacgagattgcccaaactacttcctcggatatacaggaaattttgcgcactgctcaggagttcgctgcggatctaactattgttggctccgaggatctgctggtagccgggattggggatttgttttcccaggcagggatgaaactattcggccctggtaaagccgcagcccgtctggaaggttccaaagcctatgccaaagactttatgcgcaaatacggggtgaaaactgcccgctacgaaaccttcactgatccgcaagccgcgattgaggggcttgctgatttcaacttgccggtagtagtcaaagcctccgggctagccgcgggcaaaggggtgattatctgccagactaccgaggaagcgcaggctgccgtcttagaaatcatggtggatcagcgcttcggccaggccggagaaaaagtagtgctggaagaattcctggtgggtaaagaagcctcgattcttagtctcgctaatgaaaagggaatttttccgctagtttccgccaaagaccacaagaaaataggggagggggagaccggccccaataccggagggatgggtacttttgcccccaaccccttctacacggcggagcgaaaagcacagtttgaacgtgacattttggcgccgaccttaaaaggaattcaagctgaaggtctagagtttgccggatgtattttctttgggctgatgctgactgataacggcacttacctgctggaatacaatatgcgttttggggacccggaaacccaggtggtattgcccttagtggagggcgatttttatgaattgcttaccgcctgtatggagcggcgcctagatgcttccgccataaaaattcgcgaccagaaagccatctgcctggtgctagcttcgggaggctacccgggtagctatgaaaaaggcaaagagattaccggactagcaggcgtggactatctcgaagccggggtgcgccacgaaaatgggaaagcctataccaatggggggcgggtacttaacttagtggctcgcgccgacactttagaagcagcccgcaaggtagtttataaaaatgcccagaaagtagatttttcaggtaaaacctaccgtaaagatatcggcgcggacgcgatttagggagcgaaaattgaaggcacaaatcgtaaataacctaggggacgagtgcggagttttcggggtctatggttctcccgatgcctctagcctgatttactacggtctgcatgctttgcagcatcgcgggcaagagggcgcgggaatagcggtctccgatggcgaaactattcgagtcaagaaagctaaaggactggtcaccgaagtttttgacgatcccatacgtctcagtaagttgaaaggttcttgcggtatcgggcatgtgcgttactcgacttccggcaataattggagctgtaatctgcagcccttcgtatttcatatgcataacgggaatattgccctagcacataacggcaacctggtgaattccccggatctaaaaattgagttagaacgacaaggatctttatttaactccaactcggattctgaagtcttgatgcacctgataatgcgagagcagggtagcttctatgaacggctctgcgccgccttacagcgcttgcggggaggtttcagctacctgattatgaatgacgacaccatgtacgggattgtggatccccactgcctgcgccctctggtgatcggaaaaatgaagactcggaatggctgggtgatagccagcgaaacctgtgccttggatctaatcggggccgagttctatcgggatctacgcggcggggaaatcgcgatcatcaatgaggacgggctaaaaattgaacgctactgcccgccggccgatacttgcgtagccgcgatggaatatatttattttgctcgtcccgattccaatatcctaggtaaaaacgttcatgcggtgcgcaaacagtgcgggatgactttagcgcaggaacagcctactccgggtgccgatatcgtgatcggggttcctaactcctcactttccgcggcctcgggctatgcggaggctgcacacctgccctatgagatgggtttggtaaagaaccaatacgtgacccgcacctttatccagccgaaacagtcgctgcgagaaaagggcgtgctgatgaagctgtctgcggtcaaagggattgtggaaggtaaatcggtggtgatggtagatgactccattgttcgcggcaccacttcccgcagaatcgtgcagctcctcaaagatgctggtgcccgcgaggtacatgtgcggatcgcttcaccggagtttattttccccagtttttatgggatagatgtttctaattctgcagaactaattagcgctcatatggatgttgaggagctgcaagtccatttaggggctgattccctgggatatctatcgatacccgggttggtggcatcagtcggtctggatctgcccggtgcttacggcggtctttgtatggattctttcgccggtcactacccagcagggctaggtagttacgaaaaagaatacctagagacccaaaccgagattcaaaagaacttttctgtctagaactctagttttacctggttgatatttcagcattcgccgctgctaaagggtgctttcggggttcgcttctttagctgcgcgaattttatcgcgggcacgataggcggggattaattcggttgcgagcatagcggaaactactagggcgcccccgatgaccattcgcaaagtcacgtcctcgcccccaaaaaggactgcaaaggcggcagcaaataccggttccatagtcattactaccgctgccttggtaggacgaatgtgtcgctgtgcccaggtctgcataatcaaggctccaatggccgcgaacactaccgtgtacagcaacacggtccattgtctagcgcctcgcggtaattgcactccaaagggtagtgcagctgcaaagcagaaaactccaatggcgattaattggatggctgccaaggttatggggtcgtctttggcggcccagcgggcggtgagcacgatgtggagggcaaaaagagctgctcctgccaaagttaatagttccccgaagccaatagagagaccgtttagactcaaaaccattagccccgccattgccactagggcagctaccaggttcacgggtttaattttttctctaaaaagtagccataccagcaggggggttattactacatatagtccggtaatgaaacccactacggaggcatcggcagtctctaaacccttggtttgtaagacttgtgccgcggaatacactgcccctagagaaaaagcatgttgccagacttttcggtttgctctttttaagcgaggaaaaaatatcactgccgaaagcgcaccggctattacgaatctcacccctaggaaagatagcgtagtcatagaggttaaaaggtctttgatcaggaaaaaggtagacccccaaaaagcggtggttagtatcagcgctaaaactgctaaagactgcagatagtagcgattgagtcccttcacttttccccctagattttgaccgtcactcgattctaggagccaaagcgggactaaatctatttgcagcggtgtgtactcgagcaccttgaaataagtgacagggagaaagaaaacacaaaatctaccacgagctgggttgtaggagccggcgaggccagcggtgtgctattcttcccttcaggaaaacgttaggagcgtgatgggaaccagacggtgccggcaactacctgaggtttctgtttccaattccaccccgctgcggcggggtatttttttatcaaaaacactcatggaaagggcaataatatgccggaagactatgatttcccgcgtttcggggtaggtcaacacctgatttcggtgggacagttcgatcgtgaaaacctaggggaactttttgatctcgcagagttcttacgcccgattgctcagcgcaaacaaatctgcaccgtcctcgatggggcagtgctgtgctccctgttcttcgagccctccacccgtacccgactctcttttgaatctgccttcctgcgtctaggcggagaagtagaaacgactaccggttttactttttcttccatggcgaaaggagaatccattgccgatacttcccgggtggtttccggattcacagatgttttagtggtgcgccaccccgatgctggttcggtagcagagtttgcccgccactcggtagtaccggtgttaaacgcgggagatggctccggggaacacccctcccaagcgctcctagatgtgtttacgatgcgcaaggagctgcgtaaacgggataaatccctggacggttgcaccattgcgattatgggggatttgaaatacggacgtaccgtccattccctcatgaaactgatgagcctgtacgagggagtaactttccgcttgttttctccgccttcgctagaacttcccgacgaaatcgccgaatatgcgcttagtcgcggcggtgaggtgatctattgcaataatcagattgaggctttggagggcgcggatacggtttatgccactcgggtgcagcgtgaacgcatgactaaggaaatggctaagtccacccagctgcaaggctgccttttagataaagccatgttggaagaggccggagccagcgagattattatttgccacccgttgcctcgagattcacgccccaacgcccttgacctctcgactgatgtagacgatttgcccggactatcgatcttcaaacaaaccgataatggggttttggtgcggatggcgatgttcctaaccactatgggggttggcaaagaacttgtgcaggccaaaactaaacaaaaaatctggaaagttagccctgaaggttaagcgaaagcttttctcagataacaaccggagtttagcttccggtttcttacccgcgtaacctgaaaacatggcaggagtaatccaggggttagcggcgatttgcgcggtagtagctattggatggttgctgcggatccgacacattatgaaccgcgaggtgattgacgcactcgcgttgattgtttactgggtggcaactcccgcgctgattttccgtacggtttctagctctcctttggcgggagctatcggaaaacccctggtagttgccgctagttccgggtgcacggtggccttaatatttgcggttttggcgttgattgcccgaatgcagagagttgaacgagccgtggccactatgagctcttcggtaactaatgccgctcatattgggatcccggtggctgcctacgttctgggtaatacttccgcagtggcgccggtaatcatttttcaactctgcttcctaactcctttttcttttgtgatgattgacctggcggccagtaagaaaaagctttcgattggcttggcaaccaaaatggttttcaccaatcccatggtgattgcggtgatgctggccttggcagtaaatgctacgcagattcccgttcctagcctgatttcatctttagccgatctggtgggatcagccgcaccggcgatggtgttgctggctttcggggcgtccctaaaagatatgcgtcccaaagaactcaattggaaaaccgttagcctggtggcggtctgcaaagaagtcctgcatcccctgctagcttggagcgtaggaacgatgctggggctaagcggacacgcactgctagcagtaaccgtcatggcggctatgccctcggcgcaaaactgtttcgtagcggctactcgcgcgaaagctggtgagcaggttgcccaagggggcatcatggtcaccaccgccctatttgtgccggcggtagtagtcatagcggcgcttttaacctaaagctatgcggatgccctactttttaaataaggttttgcgggcataaaccggttccgaagttacctgcaaccctagatttcgaaaaatctcggtgtctaccgaacccaaaatggtggtggtatgcacttcactgccacgcaaatgcaccagttcatctagggctttgcgagcattttcatcggtgtcagccgaaactgatagcgcaatcaaaacctcatcagtatgcagccgcggattacgtgccccgagatgttcaacttttaaggtctgaattggtttgattgacgaaggcgccagcagttgtacctcgtcgtcaatacccgccaaaaacttcaaagcattaagcaacatggcagaacagcatcccaacaggggagaagtcttaccggtaataatccgcccatcgctcagctgcatagctgccgccggagctccggtttcggcctccagatttaaagcaggtcgtaccacgtaacgatactctttagtgatccccagttttgccatagtcatcgcaatccggtgcgattcgatgggatcggcatgcgtggcttcctcattacccaaggcgtgatagtaacggcgcaccacttcttgtttggcggcctcctggcaaactaaatcatcgctgatacaaaagcccaccatattaacgcccatatcggtgggcgactgataggggcaagaacctgccagttgctgcagcagggagcgtagtagcgggaaaacttctacatcccggttatagttaactgcctgttttccgtaggcctgcaggtggaaggggtcaatcatattgacatcgtccaggtcagcagtggccgcctcataggcgagattcaccggatggtctagaggtagattccaaattgggaaagtttcaaacttggcgtagccagcttttataccccgtttatattcgtggtaaatctgcgagagacaagttgccagttttccagatcctggtcccggagcagttactaccaccaagtcacgggtagtttctacatattcattgcgtccgaaaccgtcctcagaaacaatcagcccagtattggaggggtaaccgggaatcgggtagtgctgtgcaacttttagtcctgaacgctctagacgttctttgaataacttggcgttgtggttatcttcttccatctgggtcaaaacaatgttttcgactaggaagccgcgttcgcgaaatacatcaactaggcggagaacatcttgctcatagggaatcccgagatcggcgcgaattttctggcgattgagatctttggcgttaatcgccacaatgatctccatttcgtcccgcagacgttccaacatcgaaattttgttatcgggggtaaatcccggtagcacccgagaggcatggaagtcgtcgaaaagctttccgcccatctccaggtacagcttgccgcctatatgtttgcggcgctcatcaatatgctccgattgcgaagaaatataccgctctgaatcaaaaccaatacgcattgcgcccttcctgtcttacaagttagcggggagcaaggcgcccttacccataatagtgtctgcaggcgccgggggtaaacctagaagagaacagcgtttcctaactttttgcttttcagagtgcgtttgagaaaactgctctataaaatgtttgtatgacaaataacaataacccccagtttccctcagaagatcctcgaagcggctttgaccaggagaattccccatttccctcctcagactctcccgctagctcctcctttaatcagggatccgctcaggagggatctttccaaggtggacagtcctactcgttgaacggcgaaccgccaaataactcgtttggggaatcctggcagcagccggcaagcccacagggttttaaccagtgggagggggaagctaaatctgccaaaaaatctagacctggtttggtggttggcatcttagcagcggtgatcgcactgttaggggtagttttagcgatcgggattgggatcgggattaactctgcttccaggagtgtcacgagtacctcgagcagcgtttccacttcagcatccagtgatgagggggaaagcaagagcgattccatgccgaaagttgaatatattgtgactgctgactttccggtaaaaatcagattttccgataatcttggtagccatcaagaaaaatttgccggtggcgagagcgcctggaccaagagctataacctcgaggacgattttgcatatttgcaagtttcagtgactcccgaaaaagatgattttgaaaacacgcatattatgacctgcgaaattaaaattgatggtaaaaccgttaaaaagagcgacggtgagtactcagtttcttgcgatgaagactatgaggcagattaggcgaaataaagattgcttggtaacggggcgcgaggttcgtcctcaacgttccccttcgtctattagactcgagatgtgagtattaaattaagcagtattgtggagcgtctggaggaagtttatcctcctgatttagccgaagattgggaccgcgtaggtttaatcgtagggcgaccgtcttcccagatagataaggttttagtggcagttgatccggtggagaaggtactcgcggaagcaattgagcacggagcgcagctgattgttacccaccacccgctctacttgcggggaacttcttttgtggcagctaccgacccgaagggaagcctggtacaccggttaattgaaaatgggattgcgctgtttaacgcccacacgaatgctgattctgctgccggcggggtagccgattgcctagcacgaacagtggggctcgaagatacccgtccgctaattccgcttagcgaaaatactggtagcggacggatcgggcgcttacctgtccctatgcctctaaaagaatttgctaaaaaagtggcgcagagccttcctgcctgtccggcaggaatcctagttgggggagatctagatgccctagtaagcactatcgcggttagcggaggtagcggggattctttcttaggggatgcgcgtcacgcgggcgcggatgtttacatttgtgcggatttgcgacatcatccggcctcagagcatttagaaggcgggaaaccttatctgatttgtgctactcactgggccagtgaatggccatgggtgccggggtgcgcgcgcatgctacaggagagtttcccggaggaaattgaagtaatgatttcccggatttgcaccgacccgtgggcggcgcggattagcccggacaatgaggatcgctaaaggagatggtgatggaagcaccctggaaagatcagctggctctactggatttacaagagctagatagtaaaatcgccaagttgcagtttcggttaaagaaaatgccgcagctcgcccagttagcagagctgaaagaaaaagaccggatactggacactaagaaaactaagctgtcggcgctgcaagccgataagaagagggaaattacgggtctagaaaatgatttggcggctattgagaaccgccaaaaaatccagcaggagcgcttggataatggacagggctcacccaaagagttggttaatttgcaagaagaaatccagcagatgaaaaaccgctctcacgacctagaagagcaaatgttaaccgtaatggacgggatggaacagctggagagcatcgaggaagaaatcgcccaacgcaaagccgagtatgcccgggaaatcacccggcttgagggtgaagtaggggcggaaaactcccagattagtgctcagctagagcagctagtaagcgagcgagcccagaaagctgctggtttggatgcggaccttctagatctatatgaacatattcgcgagcgaaccggcggggtgggggccgttaaggtagttgctggccggccagtaggatacgacttgtctttttcggtagccgaaaccgcgcacttgcgggcagctaaaccagaagaagttattacctccgaagatgaaggctatctgctgatccgctgcccgcagtagtcgctatttttatttattagacgatgccttgttccgtcatggcgttcgcaaccttgaggaagctgttgatatttgcgccgactacgtagttgccagcctgcccatattcttcggcagtttgcgcacattcgtcatgaatggtgtgcatgatcttggtgagttctttttcgaccttttcaaagctccaagaggcacgcgccgcgttttggctcatctccaaggccgaggtggccaccccgccggcgttggccgctttaccgggagcaaataggactccggcatcttggaacagctcagtggcgttgggggtgcagggcatattcgcgccctcggcaaccactttgaccccgccatctagcagccgcttagcatctttagaggtcagttcattttgggtggcgcaaggtagcgcgactgttcccccaactgcccagggcttggaaccagaatgatagctgaccccaggtttgcgatctgcatattcagtgagccggccgcgctcgacctctttaatttgcttgagtagctggacgtcgattccgtcctcatcaagtacccagccagaggaatccgaaacagtcacaaccttcgcgcctagctgctcagctttttcaaccgcataaatggcgacgttacccgccccggaaatcatgactcgttggccttccatatcggcaccgcgagtttgcaacattctttgagcaaatagcacggtgccatagccggtagcttccgggcgtgcttgcgatccgccccaggacagggatttgccggttaagactccggtttcaaagcggttggttagccgcttatacattccgaagaggtaaccaatttcgcgcccgccaactccgatgtcaccagcgggaatatcggtgtattcgccgatgtggcggtaaagctcggtcatgaattgctgacaaaaacgcatcacttcggtgtcggagcgaccgtggggatcaaagtccgagccccccttgccacccccgataccttgaccggtgagggcgttcttgaaaatttgttcaaagcctaagaacttcagaatcgaacggttgacggagcggtggaaacgtaaaccgcccttataggggccaagcgcagaattgaactcgatgcggtaacctcgatttacttggacttctccattgtcatctacccagggaactcggaaaagaatctggcgttctggctccaccaggcgatccaaaagcttagtttcaacgaactcgggatgtttttctaccgccggtccaatcgattccaggatttccctaactgcctggtgaaactcgggttcattggggttacgatcaagaacctcgtcgtaaacggcttccacaacactgctcatcagcggctccttactttgtcggtgagcctcgttcgcctttacggaacgaagcgcgctactcctttagggtttcatttttcgccgaagctttaccaccgctatccacattttgactaaagcattaacttttttgcctttctcacattttttaaagaggatagtaggacttagggcgcagattttagcttcaaagctcctattgctttgaggtgaacagtgtcgaggcgcttaaccagcagtcttaaggcaggtatcctggaaaacatggctgatcctgcatcttaccggccaaatccggcagatattcctcccagtcccggggtctatcgttttctagataaaaacggcagggttatctatgtaggtaaagctgttaacctacgcaatcggctagctaactattttcaacccctagattctctgcatccgcgcacccggaaaatggtgactactggggcagcggttaaatggatcacggttgataatgaactcgaggcgctgtctctggaatattcctggatcaaagagttcgctcctcgtttcaacgtgatgtatcgggatgataaatcctatccctacctggccttaactatgggggaagactttccccgtatacacataacccgggaacgccgacgagctaactcgcgttattttggcccttacacccaagtctgggcgattcgagaaactatggatttattgcgcaaagttttccctttgcgttcatgtaccaaaggagttttcaaccgcgcccaggcattggggcgtccctgcctagagggatatatcgataaatgcgctgccccctgtgtaggacggatttctatcgaagattaccgaaacttagccgagcaggtcagcgcttttttagacggaaaaactgagccctttacttcccaccttcgacacgaaatggaggcggctgcctctcgcctggactttgaacaggcagcgaaagtacgagaccagttgcgcgccctcgaaaaagttagagaaaaaaatacggtagtactggacgagagtgttgacgcggatgtatatgccttcgccaaagatgacctggaaatgattgtgcaggtgttttatgtacgtgccggcagaatccgaggtgaacgcggctgggtggtagacaccccggaagatagcgatttgccggaaatgctagagagttttttagagcagatttacggtgaataccggcagttaaataaagcggtagctcccgccaaaagcgtagacgatgtggaacatacccccacccaagcgattccctccgagatattgatgccgatgatgccggcgaacgcaccaaccctggctgcctggctaagtgagatccggggtaagaaggtccagatacgggtgcccaaacggggagctaaacactcgctgatgaaaactgtggccgaaaatgctgcgcaagctttgcgactacataaaaccaaacgggttggagatttaactcagcgttccgaagccttgcgtgagctgcaagaatatttagatttagccgatgctcctctcaggatagaaggttacgatatttcccatacccaaggtgctcaccaggtgggatcaatggtggtattcgaggacggagcgcccctaaaacgtgcctaccgcagctttaacatccaaagcacccccgcggattccgccgacgatactaaagccatgaatgaagtgcttacgcggcggtttgctaggttgcgccaagaacaagagcaggcacaaaaagagctagtgagcgcagaaagccccggggaactaagtttgcgacgtttttcctatcctccggatttaatcgtggtagacgggggagccccccaggtgaacgcggctcaaaaggcgttggaagaagcaggcgccaatgtgagcgtaattggattagctaaacgcctagaagaagtgtggctcccgggagccgatttcccagttattttgcctcgtacctcgcctgcgctttatcttttgcagtatttgcgcgatgagtcccatcgctttgcgattactgcgcatcggaaaaaacggggaaaaaccgtgcgaaaatcattgttggatacggttccgggtttagggccagtgcgacaaaaagccttgttaaaacactttggctccctaaagcgtctcaaggcggccgaggagagtgaaatcgcggaagtaaccggcatcggagaggtaatggcgaagcagattttccaatccctcgccgatagccggtaactgggcgcgcttcgtagcatacttagagcatggatgaagctcagccacactacgaatcttccccgcctactgtgcccgagggagtgcccatacttgatgaaattgctccgccgcgggaggccaatgttcccgagatgattattattaccgggatgtcgggagctggccgctcacgagccggaaaggccctagaggatctggactggtacgtggtcgacaatctgccacctgccatgttgttgccctttgccgacatgatgaccccggaaggtgaaggtattcaccgactagccgccatagtagatgtgcgtagcggggaactgttctctaagtttcaacgtgccctggacgaactttcgcggcggaatatccgctaccagctagtgttcctagatgccgatgagcgtgtcctggtgcgccgctacgagtcgaatcgccgtcctcaccccttgcaagagggagggcggatcctggatggaattcgagcagaacggcggatattggctccgattcgtactcgcgccgatgctttaatcgacaccaccaatatgaacgtccatgatctgaaccgccatatgcgcgatgtggtggccggcgaaggcgatcgtcccatgaagctgaccgtaatgtccttcggatttaagaacgggatccccctagatgccgattgggtatgcgacgtacgtttcttggctaacccttattgggtaaacgaattgcgccatctcacgggcaaggacgcgccagtcgctaaatatgttctagaacagccgggagctgcggaatttgcggaaaaaatggtgaacctgttgaccccgattttcgacggttatctcacggaactaaaaccatttgttactattgcggtcggctgcaccggcggtcagcatcgttcggtagccttaacggaaaaaatgagtgaactcttccgcgcccaaggattgccggtgcgtaccgtacatagagatctggggttggaatgagaacgttactagattcagatggttggatgactcgcggctggaccggccccaatattgtggctctcggaggcgggcatggtctttcggccactttgcgcgctctccggcatattacgcggcaactaaccgcggtggtgaccgtagctgatgatggaggttcttcgggacgtttgcgggaagaactaggagtgcttcctcccggagatttgcgcatggcgctagcagcgctatgcgacgacactgactggggtcttacctggcgtgatgctatgcaacatcgtttcagttccgacggtcctctcgataaccacgccctgggaaatcttttaatcgtgaccatgtgggatttattaggggacgcggttgaaggtctagattgggtggcgaggctgcttaattgtgaggggaaagtactcccgatgtgcgctgatcccatggagattgaggccgatttagtcctggatggcaaaaaacggactgtgcatgggcaggcaaagacagctaaagctccggggaaagtggtcgatgtgcgtcttagccctgcacatccgcgggtgtgtccccaaactatccaggctatccaggaggcagagggaatcgtccttggccccggatcctggtacacctcggtgattccccatctgttggttcccgaacttgccgaggcgttgcaacagtctgaggccgggaaagtaatggtgatgaatcttgagccccataccgatgaaactgaagatttgacgctatcgggacacatagacgcgttccggcatttcgcgcccgagatgaaaatcgatgtggtgattgtggatcccactgcgattgacgatgacgatgaattagaacgcgctgcagaatctgtgggcgctaaattggtaatacggcaagtcagggcaggatccgcctcggagcaacatgatcccttgcggctagcagccgccttgcgggacgcatttcaggggtatttatcggaagtgggcgtacccgagatctagttagaatgacggttagaaagaaaccaaatcactatttagggcggaaagggaagccgagatgtctttgacctcagatattaaaaatgagctagcggaaaaacccatagctaagcagtctgaggcgcaagcgcaaacggctagtattttgcgtttcgcgggcgggattcacctgattaaccgcaatatcgtggtggaagcagaagttgacaacgtaaaggtaatgaaacagctggtcgacagtctggaaaatttatttgatgcccatcccgatgtggtgcgggtaggggccggcgggattcgcgccgatgaccgttacgtggttcgcatagtggaaaatgccggaaacctagcacgccttaccggtctaatagatcgtgccgggcgccctatccgcggtttgtctccgcggctggtttcgggcgatcttggagtcgccaaggctacttggcggggcgcatttatggcccgcggatccttatcgcagccgggacgttccggttctttagaagttacctgccccggtcccgaggccgccttagctttggtaggtgccgcgcgtcggttgggagtcagcgccaaatctcgccaggtacgcggacaagaccgggtagtggtgcgtgatggggagcaaatctcaaaactactaaccgctatgggagcattgcgcgctcaggaaatctgggaaaagaatcgggaaaccaatcaggtacggggatccgttaatcgcctggctaatttcgatgacgcgaacttgcgacgcagcgcccgggccgcagtggcggcaggggcccgagtacgacgtgcctttgaaatcctgggagaagatatcccagcgcaccttttgcaagccggccaattgcgcttgcagcataaggaagcatccttggaagaattggggcaaaaggcggatccgccgctgactaaagatgcggtagccggtcggatccggcggctgctagcgatggcagacaaggctgcacatgagcagggaataccctccacccaggatgcggtggacgcagaagatgcacaataatcaatggtaaaagtcactattacagcctccactgcccaaaatctgggtaaataacgacaatagacctaagcggaagggcgtcaccccgtgtaaagtagaggttaagagggcggctcaagatgatcgcccccaagattgaggctgctggttcttaccggttggccaagaatcttgacctagtaagtagactccgctggttaaaccagcagttcaggaggataatagtgaccatccgcgtaggaatcaatggctttggccgtatcggccgtaactttttccgggctattcgggctcagggcgccgatatcgaggttgtggccgttaacgacctaaccgacaataagactctagctcacctgctaaagtacgattcgatcctggggcgtctcgatgccgaggtaaccttcgatgaaaagtcgattaccgtaggcgaccacaagattgtaactttcgaagagcgcgatcccgcgaacttgccctggagcgaagtgggagcagatatcgtaattgaatccactggcttcttcaccgatgccaccaaggcaaaggcacacctggaagggggagcgaagaaggttattatttcagctcccggcaagaacgttgatgctactttcgtaatgggcgtaaaccacaccgattacgatcccgagaagcacaacattgtttctaatgcttcttgcaccaccaactgcctggctcccatggcaaaagtgctaaatgacaacttcgggattgagcgtggcctgatgaccacgattcacgcctacaccggcgatcagcgtctgcacgatgctccgcacaaggatctgcgtcgcgcccgcgctgctgcgctaaacattgtgcccaccaccaccggtgctgccaaggcagtatcgctggtgctaccggaactgaaaggcaagctggacggctacgccctacgggtaccggtacctaccggctcggttactgacctgaccttcaccccctccaagccctgcaccgccgaagaaatcaacgcggcgatgaagaaagctgctgagggtgagctcaaaggggtgctggcgtactccaatgacgagccgctagtatccaccgatattgtgaccgatccgcacacctcgatcttcgattccgctttaaccaaggttatcgatggccaggtgaaagtggtttcttggtacgacaatgaatggggctactccaactccttggtcaacctgaccaaactggtaggagaaaagctctaaactaatgcgacgtaatgcataaggtatgcccgcctgcctgttccaggcaggcgggcataatcttcttatccactcacttcatgccctacgtggcagaaaggtaaagcaaataatggctctaagaggtattgagtctttaggagacttagccggacgtaaagttctggtgcgctccgactttaacgtaccgttgaaagacggtaaaatcactgatgacgggcgtattcgtgccgcattgcctacgttaaaggcattggtagatgccggggcgaaagtagtggtaatggcgcacctaggtcgccctaagggacaggttaacccggagttttctttggccccggttgccaagcgactaggcgaactgctggggcaggacgtagtcctggcgaaagatacggtaggcgaggatgccaaagcacaggcagccgcgcttaaagatggacaggtattactgctcgaaaatgtgcgttttgacccccgcgaaaactccaaagatgatgccgagcgcgaggatctagctaaagaatattctcaattggctgattgctttgtctctgatggttttggggtagtgcaccgcaaacaagcttcggtttatgacattgctaagctcttgccttccgcggcggggtacctggtggaaaaagaaatcgagtctttacgccgggcaactgacaaccctgagcgtccctatggcgttatcctgggtggctctaaggtttcggacaagttgggcgttattgccaacctgttggaaaaggctgacttcttagctataggtggcggcatggcctacaccttcctggccgctaaaggctacgaagtaggtaactcgctactggaaaccgaccagatagaaacggttaaaggctatatgcaaaaagctgaagaccgcggggtcgatctgttacttccggttgacaccttggtcgccccggagtttgcggcagacgcgcccgccactctggtggattgcgacaatatgcccaccggtcaaatgggtctcgatatcggcccgaagaccgcccagttgtttgcggataagattaaagccgctaaaacggtagcctggaacggccccatgggggtgttcgaatttgcggcctttagcgaaggtaccaaagcggtagcgcaagcacttgccgactcagaatgctttagcgtgattggcgggggagattccgccgctgcggtgcgcaccttgggatttgatgaaactaagttcagccatatttccactggtggcggagcttctttggaactattagaaggtaaaaccctaccgggtattgccgtattggaggattaaataatgactcgtaccccattgctagctggcaactggaaaatgaatatgaaccatttggaggcaactcgtttggttcaagaactggctctagatctgcaagatcaccgcttcgactatcgcaatgatgtggtagtaattccgcctttcaccgatattcgttcggtgcagaccgtggtggaatcagacaacctgaagatcacctacggtgcgcaagatgtgtctgtgcatgaatccggcgcatacaccggtgaaatttcggcctcgatgctaaccaagctgggatgctcttgggtggtagtcggacactctgaacggcgtgaataccacaacgagagtgacgaactggtggggcaaaaagctgcggtcgctttagaggccgggatgaccccgattatctgctgcggtgaaggtctggaagtacggaaagccggccagcatgtaacccacgtagtaaaacagattgaaggtgcttaccaagatatttccgccgatgatgcggttaataccgtggttgcctacgaaccgatctgggcgattggtactggtgaaaccgccactccggaggacgctgaggaagtttgtggagcgattcgggagaaactggctgagctatattcagctgacgtggccgagtcgattcgggtactctacggtggttcggtgaaatcagcaaacgtagccgagattatggccaaaccgaatgtggacggtgccctggtagggggagcctccttgaaggctgaagagttctctaagattgctcgttttgacgactagaagattttttaggtagaaattaaccgcctctgagcggtgaagttgctaacgtattggcggcgggtcgaatatgacctgccgccaatacgctatagttagggctgttcatatatttttgggagaagactttagtgcaaaccgtaatcgagattatcgcgcaagtagtgctggtgctatccagtttgtttctgattctcaccattttgatgcataaaggatcaggtggaggtttatccgatatgttcggaggagggctcacttctagtgctggctcttccggagtcgccatgcgtaaccttaaccgcatcactattgtgaccgccattatttggctaattagcgtcattgttctggggcttttgcctcgaatattttcataaattctaaccggataaaacgatttccagataaaggtgttccccatgacccgtgaaaatgaaaccagttcttctcaccgccggcgctctaaattttcttggaagaaagttctagcagctttaggtgcctttaccctgatcgcattgattgcggtggggggagtcttcggatactccatgtatcaagcgggcaaagttaatcagccccaagccaccgctactgcgaaagcgccggtaaagaagactgcgacccccgctcctaaaaaagaggtgcaaataaccctagccgccactggggacgtgctatcccacgaaccggtagtggccagcagctggaaagagggtactacccgctacaccagggaagtagaaaagatccgtccttggatagcgggggcagatattgccctgtgccaccaggaaatcccctttggaaaatctgatcaagattctcgcggatatcccgtatttaaggcgcccttgagttgggcgcaagattccaaagattttggatatgacggctgttccaccgcctctaatcacacttttgatcagggatccgaaggcattgcgcataccatcgacaccatgcgtaatgccggcttgggggtaaccggttctgccaaaagcgcagatgaaaaacgttaccaaatgtatgagatcaccaaagaggggcgttccttcaaacttgcccatatttctgctgcctatggcctaaatcaaggtactccggcggaatatgtgaataatccttggttagttaatgtaactagcgacggaaaaataatcgtagatatcgcgcggcaggcacgggctgatggtgccgatttcgtggtagcttctgtgcattctggcgctgaatacaactcaccaccttcaccggagcaggatctaatctctaaaacgcttgctgactcagggcaagtggacctttacattgggcaccatgtacacgttccccagccgatcaggaaattgcccggcggggtagatgggaaagggctttgggtttactacgggatagggaacttgctttcggcaatgcatgcatcgcaaggtattggcactcaggtgggacagattgccttccccacgattaccttgcctgccaagggacatccctatgtttccgctgccggttgggtacctctagtcatggatcgctcaaccctgcaagtagttccgggatacctctacgaaagttccgagggcgcgggcacttcgctcagcactcagaccgccgcgagttacctggcgcatctgcgggaagtcactgaaggccaagctactgagctgaaagatccaccaaccgctgattcaactactaaagtgcagcctttaaatagttaatttttcttagctgtttagaggaaatgactgtgtttttttagttgcgccaaatcagaggtgggtacgctagctcacatccatgggttatcatttcctgaaagtcgcgcagtgccctaagattatcagcgttgcaatttattcgaacaggtgaatcctgccgtaaacaggtgggacaccgcagacaagccgcgggagcgtatttgtgaaaacagacgtggaaaaactggaagaaaccagggctaaactaaccgtccaggtaccttatgaagatctcaaaccggaaatcgacaaggtatataagcaactagggaagcaggtttcaattcctggcttccgtcccggtcacgttccgaaccaaataattgatcagcggattggacgcggctatgtactggaacaggccatcaacgagcgtttaggggacttctatggccgcgctttaaacgaagcgaaagtgacccccctggggcagccagaagtcgaggtcgtagaaactcccgcagttgagggcaaacccggcggtgacctcaagttcaccgcagaggtagatatcgttcctgatttcgagctaccgtccctcgaggacgtgtccctagaggtatcgaagctggaagtaagcgatgaggacgtagaaaaggaactagaccagctacgtgatcgtttcgcctccctaaagactgtagagcgtgcagctcaagacggtgacttcacttccatcgatatggttgccaagattggggatgaggaagttgactccgtttccggagtttcctaccagattggttcccagtcgatgctcgaaggcatggatgaagcactaagtggcatgcaggccgaggaaaccaccgaattcaaatccactttgaagggtggagagcacgagggtgaagaagccgatgttactctcactttgcacaaggtaaaagagcgggaactgcccgaggctgatgatgatttcgctcagatggcgtcggaattcgacactattggggaattgcgcaccgatttgcgtggcaatgtagagaagatgcggcgccagcagcaggctttggaagctcgcgagaaactccaagactacctggtagaaaacactgatttcccgcttccgcagaagtttatcgatagcgaggttgatcgccttgctgagggacaagaagacgctgaccgcgaggaactgactgagtcagttaagaaacaggccaagcaacagattgtggttgatcgcatcgctaatgaacgcgaggtggagattgaccccaatgagctctaccagtccatcttcgagattgcgcagatgtacggggttgatcctatgcagatgttgcaggatcagaaccaggtagccgcgatggggcaagatttgcgccgtaaccgcgccttggtatcggctctacgggaagtaaccgtcaaggacgaggacggcaccgagattgacctttcagagttcaccaaggatccggcagaggcgcgggcagagcaggcggcagctgccgccgctgaggctgccgaaggcgatagtgatgccgaggctagcgaagaggaaaactagccgctagaggtatcagtaattcttaaagccagtggggcggacagtgagagctttccgccccaccagcatttacccctagctaaacgcttttcaggggtgtatacccccaggtttcatgcgctgaaagcgtaaaagggcatggcagagaagaaaaccgtctccaaagacggtagtttgatagagaaccatttttaagtcccacagataaggaacaaccgtgcaaactgcggcagtaaaaaatgagggagatcagcttagctccctagctttaggtgaccatgttttcaataagctgttaaaagaacggattatttggctggggtcagaagtggccgaggataacgccaaccagatttgtgcccagatgatgttgctagcggcgcaggatccggaaaagccgatttttctctacatcaactctccgggcgggtcggtaactgccggtatggccatttacgacaccatgcaatatattcagccagaagtagtaaccgtggctttgggcatggcagcttctatgggacagctgctgctcactgctggcactcccggtaaacgctatgcgaccccgcatgcccggattttgatgcaccaaccctcggggggcgtaggcggcaccgcctcggatattcgcattaacgctaacttgattttgcagatgaaacaggaactggccgagataaatgcccaacgcaccgggaaatcggtggaaaagatccgggaagattcggaacgtgaccactggttcactgctcaagaggccctggaatacggattcattgaccacgtaattgagtcggctcgtaacctcggcgctgatggaaaggaactctagtaaccatggctttttcacctttatatccagcgggagctccgcgtctggctgcaaatatgccgattgaccgctacgtgctccccgagttcgaggaacgtacctcctacggtttcaaacgccaaaacccctacaccaaactctttgatgagcggattattttcttgggggtgcaggtagatgattcctcagccgatgatgtgatggcacagcttttagtattggaatctcaagatccggattccctcatcaccatgtacattaactctccaggtggttcctttaccgcgatgaccgcgatctacgacactatgcagtacgtaaagccgcagattcagacagtttgcctgggtcaagcagcttccgcagcagcagtgctacttgccggaggttctgccggcagccgtttggctctaccgaacgcacggatcgttattcaccagccctcgatgcagggctctcaggggcaagccaccgatattgagattattgcggaagaaatcgatcggatgcgtacttggttagaggaaactatcgcgaagcattctgggcagacccctgagcaggtacgcaaagatatcgaacgcgataagatcctgactgctcctgccgccaaagagtacggcctgattgaccaggttttggagtcccgcaaaagcccgtcaaaaccataggatcagctagctagcgtgttgccgcaagctagctgcaaaaatacctttaggctaagaggtgcaggtctgatttaggaggaaacgggtggaggaagaggccgagctgctcaagtgctcgttttgcggtaagacccaacggcaggtgcgcaaacttattgccgggccagcagtctatatctgtaatgagtgcgttgatctttgtaacgagatcatggaagaggataccgccaagcattcgggcgagaaatctaagcccctgcctaaacctaaagaaatctatagcttccttaatagctatgtaattggtcaggatcacgcaaaacgggctctttcagtcgcagtctataaccattacaaacgggtgcaggccaaagagcgcggacagaatatcgatatgtccttgacgaaatcgaatatcttgttgctaggtcccaccggttgcggcaaaacgcatttagcgcgttccttagcgaaattgttgaatgtgccgtttgcgattgtggatgctactgccttaactgaggctggatacgtgggcgaggacgtggaaaacatcctgctcaaattgattaatgctgccgatggagatattaaacgcgcagagcgcggcattatctatattgacgagatcgataaaatctcccgcaaagcggagaacgcctctattacccgggacgtatcaggggagggcgtgcagcaggcactgctaaaaattattgaaggcacggtagcctcggtacctccgcaggggggacgtaaacacccgcaccaacagtatctagagatcgacactaattcgattttatttatcgcggcgggtgcttttgccgggattgatgagattgttaagtctcggttggggcggcattccaccgggttcggatcttctttgaaatctacagccgaacacggtgacctttatgaacaggtcactgcggatgatctgcatcgctttggcctgatccccgaatttattgggcgcttgccagtcttgacttcggtgaaggaacttactgaatctgacctagtgcgggtattggtagagccggagaactctctggttgctcaatatgcttccctgtttgagctagatgggatagacctgcattttaccgatggagcgatccgggcgattgcccgcatggcacaagaacgaggtaccggagcccgggctctttcttccattatggaggcagtgctaaaagaaaccatgttcgaagtgccctcacagcccgatgtccgttcggttactatcacggaggaagtcgtgaaccagggagcaaaacctactctcctggagtcggtttcctgctctaagaccgcttagcttggacagttctcgctctcgtcctcgccctcgtttatccttagtctatgagcagtgaacagggtaaaccggccggtaatgtgattcccccagagttattgcaggcacgcgccacaatcgataatatcgatgccgctttaattcatatcttggcggaacgttttaaatgtacccaaaaggtggggtatcttaaggcacggctgggacttaaccctgaagataagggcagggaaaaacagcaagtggcacgactacgaacgctagctgaggaggccggcctggatccggtttttgcggaaaaattcttgaactttatcgtagaggaagttatccgccaccatatcgatatagctgaacagcaggggaactagccgcgcaaccaaaccacgcgaccagggtaagcactagggttcccgttggttgttagtcttcttccaggggaccgccgtatatcgcgttaatttcgttctcaaagcgctttagcactaccgaacgtttgaccttgagtgagggggtcatagttccgttttctaaagtaaaatcagtggttagcacccgaatcttacgaatagattccgcgcgggaaaccttttgattggtgcgtgctaccgcccgctcaagcgcctttaatactgccgggtggcgggcagcgtctgaaatatccataggaggaaggttgtggttgcgcaaccacccgggtagcatctcggcatccaaggttactagggcggcgataaacggacgacgatccccaactaccaccacattcgatatgagggggtgtccgcgcaggccgtcctccagaatttctggagaaacattcttgccaccagcggtaacaataatttctttcatgcgaccggtgatgtggacgaaaccatcggaatcaatccagcccttatcttcggtgcgtagccaaccgtcctcagtataaagctcagcagtttcttcctttagattaaggtagccaggagacatgggatctcccttgaactgcacttcaccctgtgtagatacgcggactgcaatcccgggtactggctgccccaccgaaccgattttcgcgcggtcaggtgcgttcacggtggccggtcctaaggtttcagtcaaaccgtagccttcgcaaaccgtgactccaatgccgcggaagaaatgcccaagacgcactgagaggggaccgcctccagaaataatatatttggcgtttccgcccaaaagactggtcaaccgagataacaccagttggtaaaatacttgccgacgtacttttaaggctcgcgatggcccttcaggagtgtctagggctttggagtagtcaatcgcagatttggccgccaggcggaataaacgcaattttatcccggttcctgccgaggcgtcagcggcattatagattttttccaggacgcggggaacggccagcagataggaaggcctgaacgaagccaaatctgccagcaggttcttggtgtccggcactagtcctaccactccgggtccgagtaaggctccccaggaaactaaacgagctagtgcgtgggctaccggtaaaaataataggcagcgggtagttttttgcatcccaatctctgccaaataatccagaagattaggtagcaaggccgtggcgttacgctgggtgataatagtgcctttggggcgaccggtggttccggaagtgtaaataatggtggcaatagtgtcgccggtgatttgggcgttgtaggagtcaatgactgccggtgcaatctggcgtcccgcctcaataatggtcagtagatccccggcagccagggaaaatatccggcatttacgatctgcccgtgcggctactgcctgcattagttcctgagaggattgattagaagctatcgcgtagcgaatatcagaatcttgcagaatccattcgatttgggcggcggaatcggtttcgtagatcggaacggtgacaattccgattgccagcgcagccatatcgatcagcgtccactcataagaggtgggaccgtgcaaagcgaggcggtcgccgggttttaagccgataccgagcaggccccgcgaaaccgaactgatttcatcccaaaattccccggcagaaactttgcgccactgttccccgagcattgttttttgctcaataaccgtttgcgtgggatcttgagtgacgcggcggcgaaacagggacacaatattgtcatgtttagagcggatcttggtcgccggcatcgagaactctttcaaggtacccggagtttttccggccaccgcaatggttcctggcggaaaagtaatgccgtcgtctgcgtttgcttcttgtttatctttgaaccagttagtcacgcttttagcctaccttacagttatttgcgcggtttctttggcggaggggtgcctaacactgcatcctgagtcataacctgcgcctcggcctctttattaacctcgactgttactattccagttagtgaagcagccgcatctaaatccgcacgcactgccggcaggttctctgcggaccaatcatcggagtaaacaatagttacctgctcgaacggggtgcgctgtccgactttcgcttcggactttaccttgcgtaggacgctcagcgtgtcgcccgccagtttcagcagatctgcgtcccccgctgccgtctgcaaagcggaggtaacctgtggccaaggagcagtgtgaacactgccagtgcggtaccaggaccaaacttcctctgccgcgtagggcaggaagggggctagcatccgggtcacgttatcaaccacgagggcaagggcggtgcgtgccgaatcctgcacgtccttgtcccaattcccggcgaagttgtgggcgcgatccttaaccagctccaggtagttgtcacaaaaatcccagaagaaagactcggtttgctctaatgcccgcgtgtgatcatagttttcaaacgcgttagtagcggcgataataacttcattcaggcgggcgattaccgctttatctaagggagtagttacctttgcgggatctagacacaggcccgcgtcctcggtcatcgacaaagcaaacttggaggcattgagcagtttcattgctagccgccgcccgatcttcatttgggcttcttcaaaagcagtgtcggtacccaggcgagccgcagccgcccaatagcgcactgaatctgagccgtgtttttctagcagccccataggggtaaccacattgcctttggatttagacatttttttgcgatccggatctaaaatccagccggaaatcgcggcgttctcaaaggggagagcgccgaactcaagatgcgcacgtaccacggtagaaaacagccaggtgcggataatatcttggccttgcggacgcacgtccatggggtaaacccgcttaaagagatcctcatctcgcagccagccgcccgcaatttggggggtgagcgaagaggtcgcccaagtgtctaaaatatcgacttcggcagcaaaaccgccgggttcaccgcgttgctcctccgtaaaaccttgaggaacatcgctggtgggatcaatcggcaaggtttcttcggcgggcataattacctggtcgtaatcgacttcgccgttctggtcaatgtgataccaaagcggaatcggcaccccaaagaagcgctggcgggaaaccaaccagtcattatggaggccatgcacccagttggagtagcgcaccttcatgaagtccgggtggaactttagttcttccccacgcgctagcagctcactattgaggttgtcgcggtgtccgctcagcgtgtagtcgctgccgccattgcggatataccattgccgcgacattacgatttctaggggccggtcacctttttcaaagaagttggtttgccgcatggttttttggggttctccctgcagctccccgctttctttgagggcttccactacgatttgccgcgccgaaaacgtggttttaccgcggatagcatccataagttctttacctgccggatcggtgatccaatcggtagcttcgtgagtgatccgtccatctttagccaaaatgacccgggtgggtagctctaggtcacgccaccattccacgtcggtaacatcaccgaaagtacagcacatggcgatgccggcgcccttatccatttccgctgccgggtgcgcgagtaccggaacttcaacgttaaatccggggctggttacggttttaccaaatagatgctggtagcgttggtcgtcagggtgcgccaccaggcagcagcaggctgctagtagttcgggacgggtggtttcaatgatcacgtcctgcccatccggaaggtggaaagcgagcgcgtgataaaaaccaggatagtcacgcgcctctagttcagcttgcgccaccgcggtttggaaagttacatcccatagacccggtgctgccgattgataggcttcgccgcgttttaagttccgcaaaaaagcggtttgcgcaactttttgggaatccttagaaatggtttggtactgatgtttccaatccacgcttagccccaggcgccgccagagtgcctcaaaagacttctcgtcctctttggtcagctcttcacacagctcaataaagttcttacgggaaatcggcacctgatcgcgagccttaaccgacttggaatctccgtgatgaggcggcacaaaatctgggtcgtagggcagcgtaggatcgcagcggactccgtaatagttttgggcacgccgctcagtaggcagcccattatcgtcccagcccataggatagaacaccgctttaccctgcatccgctgataccgagccagacaatcggtgtgggtataggaaaacacgtgtcctacgtgcaaagaaccagaggccgtgggcgggggagtatcaatcgagaacacctgctcgcgttccgcctcgcggtcaaaagcatagacctgttgttcttcccaggtctgaccccagcgttcttcgaggccgtctacgcttactcgctgtggaacctgaggtgcgggtaggtgtagatctgctaaatcccggtgatcgtggggattactcatcggccatctcctattttattcttttccctgtctaccgcctgttcttctatatcgcaggacagtaactggcgtttatataccctactaaactactcggtttcgcagaccaaccccaaaatctagccctatgccctcgaggagccaaaagcattgaaaacgcagctgttttaagaaaagcccgccacccggaatcttcaatcaagactaaaaccgggtggcaggctcttctgcgaacgcctcaataagaagctgctaactattttgcgtttcccctccgttttcgcgggcaatctgcaagttatagggggtgtcccaataaacttcctacttaaagggattacgcccggtggagcgcaccttataaaggtgatacccgaacaccaccacattggccactagcgctgctgccgaaagcaaaaacatagcagtggggttgtgagcgctgcggtgggcgaatatggaatcttgcataaagtgcgggaaagttagcactatcgctgaccagaaggtcaaggtgtaggcccggtattgaatccaggcacctttcccgaaggccaggaaggccgggatagtacaggaggctaatagggctacccccgaataccaggcgcggtcagctaggcagttgtaaacgtaggcaacattccacagatcgtaggcaataatccaaccaatagtcagatcgccccaaataatctgtttgtttttgcctttggacacgtaaatacccatccagcctgaaatcatcaggaagtttaggattccggcaatgccattcatgatattccaggggccaccccaggtcaccatcccttgggagggatccaccccgtggatgccgtaacactggaaatcgcgaatcacggcctcgataatgtttatcgccaagataaacgggggaatacatagataccagcgtttatcacgcagcttcgggagatattgtagagccaccagcgataacgacccgattagcgcggagtattgtttcactatcgggaaccagccatcagagttagtgccggcgcgcgaatagggccaccaaaaaatagtgagcgccaccgggatcacgatgaatactgcaatcgcgacccatttgtagcggattgctagccaagccaataccgcgagtcccgcgatgactaccactagcatcaaatagtcataccactggcctaactcaaaaaagaacagagtgggatagtccggtttcatcagttactgcgccgccttctttccccagccaggaagataggttttttctttcttttggcgaatctgttcctcccaggaaaactcgggttgttcccaatcggtgaaatagtcactatcgatctcctgtgcccagggggaatcggaggaagtaggaggccaggccgggttatcggtgaccggaggacgtacctcgtttacggccggatcttgacgaccgtagcgcagccactggttgtgggtgtcttcgtagagttcggtgccgtcccagcgtcccgcgggagtgtcgtatccggagagcttgcctccaaggactgcccgtttaatccgaccttgccattgcggtttcttccggaattccgctacccgcttcacgtagaggttctgcaggtgcgccatgcatccgccgatcagttcaatgtttatccagttgatggcggccgcaaatttggtatcgggttcaaaaccgatacgccaatggttgattaagcggcagcgttctcctttgaggggaatcaggtaaaaacaccaggcggccgcgtagtgtttcattcctgggtagcggaatgcgaaggatccgggagcgcgcggtgggtgcttggtgtcaacccattgggaaaggtacttccctggcaccacatccgcccactccattgacatcccggtaaagtcgaatccggcgatatctccgggtttcaaagcgtcttcgccttgccactgttcttgaatttcgtaagagttgaagaaaggtaaccgcgcaaaagtgcgttccaagaattcagaagaataagaacccgccttatcgcaacccaactgctttaaatgccgataaaccgcataggcgggagcatcaatgttgatggcataggtagaggaacgaccattggaatagcaacggtcgattaaatcatctgaaggatagtgccactcgttttcctctttggtggctttacccgaaaactgactgaagcccagcattccgccgagggcagcgctgcccccgaaagcgccgaggcgcaatacttttccaattcgactgtggttagcagacattgatcttctccgtaggttattttttttaaaacaggcaacatcgttgtcatccgtgcgttaacatataatacactagtgtattaagaataatgacctcttttgaaaagaaaatcattagagtcatactcgcagatagtaggcaaattaaaagataatatctaagctcaaaacgaccgggcagcgtcgctcggtttaaaaggaacaattatgggatttttatgggaagtcggcccaatctgggtctaccttttctggattctaattttcgctctccaaatgttagtggcagaaatgcatcgccgctggacttggactgctttcgccctctggacagtaggtggggtgctagcgattccctacgtcatcattcacggggttcccatggtgggatggttccccttcggcaaattcatcatcatgctagccaccgccactatgaccgccttcctgctgcactggggcaaacgtaaccccctaaaagctcgccgctatgctatgtggtttggcgttgccctctggatcggtctggcagtaaacattatggaagccaatattcgcgacctaaccatctactttgaagccgacagctaccgcgcctgtgccaccaactttcaatgcctgatggatattgattcctcgcgctcgatctcgatgattgaggggctacccgaaacccgcggaatcaccgctgccagcggctcagtcgcctggtatcaagcagcagctgatgcttttaaagccagtggagtaggcatcgacccggccaccgggttccgcaccatcggcggatactggaatctgctgtccgctgctgccggggtgctaaatattattaccatcaccggtctgggcaaaatctttatttcttccgcaaagaaagggaaagtacaaggcctgatttgggcagatatggcctggccgtggattattgcctatgacctgtggaaccattccttcctatataactcactcgcggactacacctggtactgcaccttggcattgctgctcgcgtgtacggttcccgcttttacttgggcgaaagggcaatggatctggttccgctgtttcaccttgatgttctggatagcagctaacaatatcctcccggaactactggtgcgaccctcaataatgaccaactacgccacgatgaacccgatggcgaatatcgtttgtgcttggctggcactgatatcaaacgtggcgctgtttatctattggctgtacaagatgaccaaacatcaccgcaatccctggacgaactgtctcttcttcgagctgggagcctttaggaaagtagtaaagctctacgcagacgataaagacaagtacttcttgaccgactttattcccgagactcccacgcagctaggtttcgaacccaaatctacgaccccgccggtagacggatatgtgggatgggtgccctggtggaaaaaagacaaacgctatccaaaaccgcgcactccactgtctgccgaccccaagctggtggaaaaagggatcaaatctgatccccgctgggacgttaccaagtcaaaggaagcgtaaccgtctgcagaaatgcaaaatagaacgtttgttcgtaggataggaatgtggatgaaaaactagtagttaaaggggcaagagaacacaacctgcgcaacgtgggcattgagattccccgcgacaagatggtggtgttcaccgggctttctggctccgggaagtcctcgctggctttcgacacgatttttgccgaggggcaacgccgctatgttgaatcgctgtcctcctatgcgcgccagtttctcgggcgcctggacaaaccggatgtggattttattgccgggctgtctccggcggtttctatagatcaaaaatctacctcccgaaacccccgttctaccgtgggaactatcaccgaggtctacgactatttacgtttgctgtatgcgcgtgccgggcaggcctactgcccgatttgcggtgaaaagatccaggctcagaccgcccagcaaatcgtggatcgcctgctaaccctgcctgaaaagacccgattccagattttggctccggtggtgcgcgggcgcaaaggcgaatacaccgaactttttgcggacctggttacccagggattctcagcggcagtggtggacggggaaactgtgcgccttacccagccccccaagctggaacgcaaaatcaaacacgatattaatgtgcgcgtcgatcgcctagttatgaaagagggggtacgtacccggctctccgactcgattgagaccgcccttaaacttgcagacggcctggtagtggtcgattttgtggaccgagatgaatcggatcccgaacgttcccgccgtttttctgaaaaccgtgcctgtcccaatgatcacccgctacaactcgaggaaatcgagccgcgtactttttccttcaatgccccctatggggcttgcccagattgctccggcctcggctcccatctggaagtagaccccgaattggtggttcccaacccggaactctctatctctgagggggcgattcgcccttggtcgacaaaaaataaatacctaatgcatatggttgcgggcctgggggaggaactgggattcgacctagatactcccttccgcaagctctcggcctcccaaaagaaagcccttttaagagggcgcgattaccgggtgaaagtaaagttccggaatcgctgggggcggatgcgcacctattcttccggattcgagggcgcgattccttggatcatgcgcaaacgggaggaaaccgaatccgaggtaatgagggcgcgttacgagggctatatgcggcaagttccctgttccacctgccacggcgaccgcctaaaaccagaagtacttgcggtaaaaatcggggaactaaatatcgcggagctaactaaactttcgatttccgccagtggcaaatacttggcggaagtagcactgaccggcccggcgaaaaagatcgccgaacctattttgaaagaagtgcaggtgcggctgcagttcctacaagacgtaggcttgggatatttaaccctagcgcggggagctgccactttatctgggggtgaagcccaacggattcgcctggccacccaaataggatccgggctagtcggggtactttatgtactcgatgagccctcgatcgggttacatcagcgcgacaatcacaaattaattgaaactctaaagaagctgcgcgatttagggaacactttgctggtggtcgaacatgacgaagacaccattcgtgccagcgactggatagtcgatatcggtccggccgccggggaaaacgggggagaagtcctctattcgggtccggtaccggggatagctgattgtgagcgctcccttactggacagtatttgtcgggtaaaaagcagattgcagtccctaaaaaacgacgcaagattgagaaagatcggcagctaaaaattattggggcgcgagaaaacaatctaaagaatctaaatgtttcgattcctttaggtaagttagtgctggtcaccggagtttcaggttcgggaaaatctactctaatcaaccaggtgatgtaccaggctttagcggcaaagctacagcgaaaaagagtggttcccgggcgccataaagctatcgagggactggaacatctggacaaggtagtacacgtagatcaaagcccgattggacgcaatcctcgctctaacccggcaacctataccggggtgtgggatgcagtccgtgctctctttgcccaaactcaagaggcacagctccgaggctacgggccggggcgtttttccttcaatgttaaaggtgggcgctgcgaggcttgtaagggagatggcaccctcaaaatcgagatgaacttcctgccggatgtttatgtgccctgcgaggtttgcggaggcgcgcgctataaccaggaaaccctacaggtcaaatatcggggtaaatcggtagccgatgtgcttgatatgccgatcagtgaagcggcagagtttttcgctcccatcggtaaaatctcgcgtcatctgaacaccttggtagaagtgggtctcggttatctgcggctagggcaaagtgctaccactctttccgggggagaagcccagcgagtgaaactggctagcgagctgcagcgtcgctccaatggacgcaccatttatgtgctagatgaacccaccaccgggctacatctggaagatatccgcaaattaatgctggttttgcagtcgctagtcgacaaaggtaactcggtaatcgtgatcgagcataatctggatgtaatcaagtgcgccgactgggtgattgatttaggtcccgagggcggcgacggcggcggaaccctggtcgcgcagggaacccccgagcaagtggccaaagtgaaagcctcctacaccgggcagtatctgcataagattctgaagtgacctcagcttagataactatgcaagcaagcccgcaccacgaggataagccgtttttggcttttgccctgtgctaacctacgggaaagagaaaactattttgaattggagattcgccaatgggagctcccctcatcgatctaatgcaattcacttcggtggccgcagcggtgctggatcgcgcccgcaggcgtcctcgacaaatagcggttgaacgtccctccgcgcttggggctgcttgggaaaaaatccctgcatcctcgctaggagccgatattcgcgccgccggattagggtggatcggtctggggttcaaaccgggagatgcggtttctatcctgggatccacctcctacgagtggatggttatggatctgggagcgcaagcagccgggctagttaccgttccgatttatgaaactgactcttatgaacaggtaaagtggattgcgcaaaaagcccaggtaaaggcggtaattaccgattctacggtgcaggcgaatatggtgcgccaactggataaggaacctgaacttgccggtcaaatctcggtagtcttttccttagacgattcgggctttacccgtcttctagaacacggacgcgctatttctgctgccgaattagatgagcgcctagagcagataaacactgatgacctttgcaccattgtgtttacttccggaactactgggcgccccaaaggggtagaaatcacccacggaaacttcctgcgccccctaaatgccgtcatcgagcggcgcagttggaacgaatggatctatgaccctggagcccgggtaatttactttttgccggtagcccacgtacttgcccgtttcttggggtatcagcaactggtaggtcacggtaccgccgctttcttgcctaacgccaaaactattgttaaagatattcagactttcaagcccaatgctttgctggtggtgccgcgggtgttggaaaaaatctataacgccgctgatgcgactgccggatccgggattaagctgcgaattttccgtttagctgcccataccgctgagcagtgggcgcgcgcgcaagagtccgggaaagaattttcctttgggcaaaagctaaagatttctttagctcggaagctagttcttaataagatcaaaaaacttatgggtggcaacctgcaggggatcgtatctgggggagcacccatggccgagcggctcggccgcttctttattggatgcggaatcgaagtcttgcaaggatacggagccactgaaactacaggaccgctgacaatgtcagaccgaattggcaataaaaccggatacgtggggcatgcgctgttatgcaacgaagtgcgtctgggcaagggtggcgagttgcaggcacgcggcggctcgattatgcggggctactacggggaaccagacctgactcgggaagctttcaccgaggacggctggttgaaaaccggagatattgcgcagattgatgcggacgggaacgttaaaatcaccgggcgcgccaaagaaatcattgtgaccgctggcgggaaaaacgtagctcccgaatacctcgaggaacgtttgaaaggacatcccctaatctcacaggtaatggtggtaggagataacaagccttttgtcgcggcgctagttaccctcgataaagaaatgttgcccacctggctgaagaatcacgggatggaacagatggatattacccgggcagctcgcgatccgcgggtactggaagctttgcagcgggcagtccagcgcaccaaccgggcagtctcccgggcggaatccatccgtaaaatcaaagttattactactgattggactaccgaaaacgggatgctgaccccctcgctgaaaattaaacggaatcaaattcgcgccgtttacggggaacaaatcgaagatttatttactaagcgggaagaaaaatagtagatcagccggcctataagccgggttctgtactggcgaagccagcggcgaccatctatctacgacgtacgttaccgcacgcctgtagcaacctacccgcaagttaaaggcggaccacccaactcgctgcttggtcttgctccggatggggtttacctagctggccaagtcaccttgaccactggtggtctcttacaccgccttttcacccttaccaacgcgagaacgtggcggtttgttttctgcggcactagcccgcgggtcaccccgggtggctgttagccatcatcctgtcctgtggagcccggactttcctcgactattactagccgcggccgcccggccgactgatccgggtcaataatacctaaaggcatcctctcaccgaaaagcaaagcgctattttatgaatctaaatcggcaagagggctgctgattttctggaggttggtagactaaagacatggttgcctatatagatattcacccagttaatccgcaagcacggctgatcacgaaagccgctgacattattcgtgacggaggcgtaatcgcctatcccacggattcgggatatgccctcggatgcaaacttggaaacaaagcgggactagaacggatacaaactatccgcaagctgcctaaaacccacaacttcaccctgatctgccatgattttaagcaactggggaagctagtaattgtcgacaattcggcgtttaagctgataaatcggctcacacccgggccttttaccttcattatgaagggggataaggcggtgccccggattatggttaatcccaagaaaaagaccgtgggggcccggattcccaatcatgtaactaccttggcgctggtagaagaattgggggagcccctgatgtcctctactttgattttgccggataaggatgtgccggaatctaacgggtgggaaatccgtgacgaaatcggttacctgctagatgcggtgattgaagggccggtagaagaagctcgtcccaccacggtcattgatctcaccggagaagttcccgaggtagtacgccagggcgccggtgatctttcggatgtaatgctctagtggatcttttccagcaagccgcgctgagtgagcagggaataccggcgttctcagattctgcgcccctggcggtgcggatgcggccgctcagtatcgatgaggtggtagggcaaagtcatctgctcgagcccggttctcctttgcgcaggctattggagcctcaaggtagcgcgggggcagtgagttccataattttttggggtccgccgggcactggtaaaactacccttgcctatttggtagccaccgcctcgaagcgaaattttgtggaggtcagcgcggtttcggccggggtaaaagaggtgcgggcagttattaaagaggcgcgcgagcaactgcgcgctactgggaaacaaaccgtgctctttgtggatgaggtacatcgtttttctaagtcccagcaagacgctttgctgccggcagtagaaaactcctgggtaatcctggtggcggccactaccgaaaatccctccttttcaatagtgtctccgctgctgtcacgatctttactgctgactttaaaccctctaaatagtgaggacgtgaaacagttgctgcgccgcgccctcgtcgatgaacgtgggctaaaaggcaaggtaacggccgatgaggaagcgctgacccgcctagcagatttaggaggcgcagacgcccgcaaggcgctgaccttacttgaggcagcctccgaaggtgcgctatctgcgggacgcagcgccctcaccaccgaagatattgcgcgcgctgccgatagcgcagttgtgaaatatgaccgtgatgatcactacgacgtgattagtgcttttattaaatccatgcgcggctccgatgtggatgctactttgcattatttggcgcgcatgatcgaagggggagaagacccccgctttatcgcccgccgaatcatgatttgcgccagcgaagacgtggggatggcagatcctaaagccttagaaatcgcggtggccgccgcgcaggcagtgcaaatgatcggtatgcccgaagggcggattatcctagcgcaagcggccgtggcagtagccaccgccccgaaatcgaatgcctcctatctgggaatcgaagccgcgattaaagatgtacgggcgggaaaaagcgacgcggtacccgccccgctgcgtgattctcattaccctggcgcagagaatctgggagtgtccggatacaagtatgctcacgactatccgcaccatattgttaaacaaacctatctacctgcagctttagttggaactgagtattatcatcccaccgataacggatatgaggagctggtagctaagcgactgcacaccattcgcggcatcttggccgatggcaaaggcgaaccaaaataggctaatctaaaacctgttgtctacaggcaaccctggggtcttagcccgcgtggtgaccccaccggcctcgccggtgaaatgaaaaatgaagaacacatacaggagaaaaactaaatgggaaataagcgttcgcgtaaacaggttcgtctatctcgcgctttggggattgctttaacccccaaagctcagcgttacttcgatcggcgtccctacgggcccggtgaacatggacgggctcgtcgccgcagcgaatccgactacgctatccgtttgaaggaaaagcaacgtcttcgcgcccaatacaatattcgtgaggcgcagatgcatcgcctattcgaagaggcgcagagcattaaaggcatgaccggtgacaacctaattgtgttgctggagtcgcgtctagatgccctggtattgcgctcgggttttgctcgcactatgccccaggctcgccagacggtagttcaccgtcacgtcctcgtagatggcaaaccggtcgatcgtccctcttaccgggtaaagccgggtcaggttatccagattcgtcccaagtcccagactaaggatccctttatcgtagcggccgcgggttcccaccgcgacgtgctaccggatgtgccggcatatttggatgtcaacttggaacagctccaggccacctatgtgcgtctgcctcagcgcgatgaaatcccggtcgtttgcgacctgcagatggtcgtcgagcactactcgcgttaatcttaaaaattttcgcctgatgcctcctgatttttcgggaggcatcagtcatatttgcctcggttcggggctttgggcgcggtagggtaaaatttagcgatataagcatttcttagggaaggaaaaactatgagcgtcggtgagatagcttcactaatcgcagcggtagcttttttgctgctggtactgttcttggcaataccactatggaaactagggaaagttttcgaccagctacaaggctctattaaacaggttgcctccgataccggcgataccgtcaaagaagtttcacagacggttcgggatgctaacgcccagttggtacgggtagatgcggttaccacttcggccgcgcaagttgctcaagacgtctctgcggtttcgaccctggtttcttccaccttcgccggtccgttgatcaaactctcggccttttcctacgcggctcgcaaaatgtttaaccggaaaggtcagtaaccatgaagaaactggtaaaactggggattgcggcagcactggtaggcgctatcgcctactcgattccgccggtacgggagcggatgcaggcagcctgcgcctctttccaagaggactttgagaatagggaaaggcagctgcgcgcggctttaatgcccgaaaccacccccttaagttaaccgcttttcaaccaggaggtttttcctcctcataaagatttagaggcataatgcaaacttctgaaattcgttcccgctggctagactattttgcgaagcagggacaccacttggcgccttcagttcccctggtgtctcccgataagtcgattctgtttacgattgcgggaatggtgccgttcattccctatattgtaggtaccgaaccggcaccttggccgcgagctgccagtgtgcaaaagtgcatccgcactaacgatattgaagaggtcggcaaaaccaccaggcacggaactttcttccagatgtgtggaaacttcagtttcggcgactatttcaagcagggtgcctccaaaatggcctgggatctgcttaccgggtctgtggacgaaggcaaatacggcctggacggggacaaactgtgggtaacgatttgggaacaggatgacgaggccgaggacgtatggctaaaccaaatcggcctcgaccccttgcacctacaaaaactgccgcgagaagaaatcttttgggataccggacagccgggaccggccggtccttgcgcagaaatccactttgatcgcggtagcgcctatggcccggagggcggcccagaagtagataccggcggtgatcgctatctggagctgtggaacctggtattcgaccagtacctgcgaggcgaagggaccggcaaagactacccgctgctaggcgaactagacaagaaatgtatcgataccgggttgggattagagcgactagcgtttttgctgcaaggcaaggacaatatgtacgagattgaccaggtgttcccggtaattgagaaagcccaggaactgtccggaaagcagtacacccagggtaaaacttcaaaagatcctaacgacatcaggatgcgagtagtcgccgatcacgtacgcagtgccctgatgctgattggagacggggtgcgtcccggaaacgatggtcgcggatacgttttgcgtcgcctgattcgccgagtagtacgcgccatgcgtctgctgggagtaaccaagccggtgttcccggatctgctcccagtctccaagcaggtgatggcggcctcctatccagaattggatcaggattggaaaactatttctacggttgcctacgaggaggaggacgcttttagacgcaccctcgagtcaggaactttgatttttgaccaggcagttagccaggttaagaaacgccacgaaacccagctgtctggtaaagatgcttttactttgcacgacacctatggattcccgattgacctaactatcgagatggccggggagcacggcatcaaggttgatcgcgagaagtttacccagctaatgcaggagcaaaagaaccgagcccgcgaagatgcccgtgccaagaagaccgggcacgtagacgcccgcatctaccatgaactcgaagccgagctcggtcacgaagtcgaattcgtgggctataccgaagatagctgcaacgccaagattatcgggctactagctgatggccaagcggtacccaccgcctcggcaggcagcaatgtcgaagtcgtcttagacaccacgcctttctatgccgaaatgggtggccagctggctgatcacggaataatccgctccttccagggcgccaaatttaaggtcgaggacgtgcaaagcccagtggctgggttgcgggtccaccggggaaccttagagcaaggacagttaaccgtaggtgatgaagtagtggcggctatcgacactgcccgccggaaagcaatcgcccgcgctcatactgctactcacatgttgcataaagccctgcaagagaacttgggggcacaggctacccaggcgggttccgaaaacaatgaaaaccgactgcgtttcgacttccaccacacccgcgcccttaatgcagagcaactagggtcgatttcagatcggataaacgatcgtttgcgggataacctggaagtaaataccgaggttatgccgattgaagaagccaagaaatcgggagctaccgccctgtttggagaaaaatatggctccatggtgcgggtagtagatattggtgatggctgggatcgtgaattttgcggtggtacccatatgccttctaccgggtacctgggacaagtagtcctgatgggggaaaactccatcggatccggggttcgccgaattgaagccttggtggctgatgaagccaatgaattccaagccaaagaacacgccctggtatcgcaagtcgcctcgattatggggactaagccggaggaaattccggcacgcatcgatgatgccttgaagcgtttgaaacaggcacagaaaaaacttgcgaaactgcaggaacaatcgctgctgtcacgaatcggagaaatcgctgcctcggctaaagatattcacggcatccgagtgattacttttaatgccggagaggtatctgctgattctttgcgtatcctcgcccaatcgctctgtgagcatctaaaagaggcaaacgcggtgattagcgtagggggagtttcgaaagatcgccctcaggtgatcgtagctaccacccaacaagcccgcgaccagggaataaaagccggtgacctggttaaaatagcggcgcaaaccatgggaggcggcggaggcggtcgcccggatttggcacaaggcgggggtaaagatgccagtaaactcgctgatgctcttcaggcgatagctagtaagatcgcagcgagataatgcgcaacggggtacggatcagtatcgacttaggtactcgccggattggggtggctcgctccgatgcggcgggaactttagcgtttccggtggagaccatttatcgcgatgggggacaagaacttttccagatcgccgaactagtagctgagtatgaggctaaagagatcattattggtttgccgcgtctgctcagcggaaaagaaggcaaaaacgctgctgacgtgcgctcctggggtgccgaattggaacagctgttaccaacttgtaacataagacttgtagatgagcgtcttaccagcgtcagcgctcaccaacagttgcgttctgccggacttggtggacgccaacataagaacgtcgtagaccaacaggctgcggtgctgatactggagcatgcactggaaacagagaggcaaaccgggcagattcccggagtgccactgggcagcggacctgaaagcgaggaagcctgatgagccgggagcctaacaccacccctccaacgcgacattttccctcccgtcgcgccgataaatcaggggccgccagtcctgaatcaggcgatggtcaggccagcctcgataactattgggaagaggaggctccgcagactaagccgcctgctgctgcggcttcaggacgggctgcgcgcagcaaagcccggcggaagaaacgcactatcgcggcaatcgttattttggtggttattgggttaatcgccggggcttccataatcgccaccagggaactcggggggatcagcactattttatctggtggtaaggactacgagggtaaaggctccggggaagtaattattgaagttcctgagggcgcctccgggaaagctattggtgcgatcctccagaaaaagggcgtaatcgcggatgctgaagtatttgccgatattttcaagaagaactccctagcgcaaggggtgcaggcgggacgctttaggcttcataaacggatgtcttcacgcgaagccttggcgatgttgctggatccagcttcgaaagcagatattaaagtaaccattccccccgggtttacagtcaaacagattaaggctcgttttcaagaatcgatcggctttagcgctgatcaagtggcagaagcttttgcggatccggcagattatgggattcccggtcaaagcgaagaaagctttgagggctggctggcacctgacacctatacagtggccaccaatcaaagtgctaaagacctagtaaaaaccatggttgatacccagattaagcggctggatgatgccggggtggcagctgaccaacgcgcaacggtactgattaaggcttcgatcctggaaaaagaagtcaatgtggaaaaatactatccacaggtagcgcgggtgatcgaaaaccgtatgcaagataatagcgatacccacggttacttgcagatggattctactgtcgtttatggtcaaggacgctcaggcgggattcctagttccgaagatttggaagaagataccccctacaacacctataaacataaggggttaccgcctaccgcgattggtacagtgggcgaggcggccttgaaagctgctgtgaaacccgcagatggcaaatggctttacttcaccacagttaacctggacagcggggaaactaagttcgccctcactttagaggaacaaactaagaatgtggaagaactaaagcagtggtgccagcagaaccaaggcaaatgcaaacgataaagccctgggcggcggtaatcggatcaccgattacgcattccctttctccggctctgcatctggcggcctatcgagatttaggcctagagatcgattaccggcggatagaggtcaaaaaagacgaggtggaatccttcctcgaatcctggccagaggagctggcgggactgtcggtgactatgcccctaaaacaggtgattattcccttgctttcccaagttgacggtttagccaaagcagtgggggcagtaaataccgtagtgccgtttccgggaggaatcactgccggattcaacaccgatgtttacggcatagtggcggcgatcaaagaagtaaaaggacgggactggtctcccaaaaaagcggtgattatagggtcaggagcaaccgcgtcctcggctttagccgccctggtggaactgggtacggggcagattaacctggtggcacggcgggtttcgggcgctggcaacgcggtgcaggcggctacccgactagggatcgatccgggatatgttcctttagcagctcccgataaagcccgggaaatcctggaaactgcggatttgattatttctactgttccccgggaagtcctcgacgatttttataaaactatttcttttggcccagatcaaaccgtgctagatattgtgtacgatccttggccgagtgtgctggtaaaaagggttacgaacattggcggtagcattatttccgggaagttaatgttgctgcaccaggcagtaatgcaggtgaaactatttacttcccgcaccccgaacctggaagtaatgcgggcggctattattaagaaataaaggcgggatcatgcatattcttgtatttttagcggcgctgttattcgccggagtcggaaacctgctttacggtttgccgaaggtaaagaaatattttcgtctggcgggccggcagcgagctttttggaatcagccctgggcaatcgcagtagttgcgggactggcggtgtgcgcggcagtaatcgcgcgtttcggatccatcaacctcttgctaatgtttccgctattgaccctaggtacggcactgacggtaatcgatgcgggtacccaacggcttccgcgctcgatgaccgcagtctttctggtgctagttgtggtggcggtaattttggctggtttcattactggacagtgggtaaaaccggcatacgccctgatcgtagctttaggaacctttattttgctgttaccaggaacctttgtgcgtcacggtattggggtaggggatttgcgactagcccccctgctagttggtttagcaacttgctcttcttggcactgtctgctggctatggggatttttacggttttaggagctggctgctgggcgatttatttggtgatcgtgaaaaaagccagtcgcagcactcgttttgcattcgggccgtggctattaaccgcgacctatattgcgcttgtgctagttccccgctaaacgcgaaaagcagctagaggcaggagcgttttctagaagtggaaagctaaaccacgaaaaaccgttccatgacacaataaagccatgttgaaatggatgagcgctggggaatcccatggacgcgccctcgtaggaatcctagaaggtctgcccgccggagttgagattagcaccgctaaggtaggggagtatttggctgcccggcgcgccggatacggacgcggggcgcggcaaaagttcgaacaggatctagcacacctggtgggtggggtaattagaggaaaaactaccggagctccgattgccctactgatcgaaaatagtgaatggccaaaatgggaaacggtgatgagcccggatccggtggatccggaggcactaaaaattaatgccggcaaaggtgatgagcgggaagttgcccgcaaccagccgcttacccgtccgcgccccggacacgctgatctggcgggaatgcttgcctacgatttggaagaagcgcgcccggtcttagaacgcgccagtgcccgcgaaaccgctatgcgagtaggactgggtgcatttgcgcaagagttcttaaaacaagctggcggaatcgaattggtttcttacgtaacccaaattggccaggtagccctcgaggacggtcacccgattcctccgttaagcgagcagcaaaaactggcagaaaacccggtgcgttgcccggacgaaaaagtcagtcagcaaatgattgcccagatcgatgcagcgaagaaaaacggagacactatcggaggtagcgtagaagtagccgcctatggggtgccgatcggactggggagtcatgtggcggcagatcgtcgcttagatgctcgcctcgccgcagctttaatgtcgattccggcggtaaaaaccgtgaaagtaggggatggcactcagccgtacctgccgggctctgccgcccatgacgagattattcgcgccgctaacggggaaataactcgcggctctaatcatgccggcgggatagaagggggaatgtccaacgggcaaatcatccaggtaagctgcgaatttaaaccaatctctaccgtgccccgcgcgttgcgcaccatagatttagcgaatggggaggaaagccgcgcgaaccaccaacggtccgatacctgcgcggtgattccaggagcagttattgcccaggcgcaggtggcgttggtactggccgatgcacttctagagcatgtaggcggatattcgctggcgcaggtgcgcgaaaatctaaaggcatatcagcagcgagtggaggcacggctatgactgtcgaaaagcaaatagtgtttatcggtctgccgggcagtggaaaaacctcggtaggacgtctagtggcagcgcgtttaggacgtactttttgcgatgccgaccaggaaatttcccggcaggcggcgatgaccataccagagatattttctactcgcggtgaggactactttagagatttagaagtcgatgttattgcccagcttctgcacggtaatgcgggagtgattgccttgggaggaggggcccttacccgcccagaaaccgtcgcggctatcgccgataaagaggtggtttttctaaatgtgtcacccgctaccgccggggcaagaataggtgaagattccgcgcgccccctcttaaagggaagtgaaaatcccagccaaaaaatcgcgcaactagaaaagcaacgacgggctaactacctggcagcagccactttaagtgtgcctgcagatggcagcctcagcgaggtagccactgccgtaattcgaggtttgaaactagcagaaacccgaccgctatctcactacgatttaagttccctgggtgtcttgtcgaaacaaactccagaaaaaatccggcagattccggtgacttctggaaatggataccaggttagcgtaggcagcagtcttagttcgcgaatcggccagatactgcaggagcgccctcgcaacctctttttgatctgtccagcgcccctggagcaagcggctcgtcacttggcgcaatccttgactcaagccgggcaggtggtcaaaatttttccgcatcctgacggggaagcggcaaaaaatattcgggtagttgaagatgcttggcggattctgggagaaaaccacttttcgcgcgaggatgcagtagtaaccctaggaggtggggcaactaccgatatgggaggtttcgtggccgccacttggctgcgggggatcgaactgataaatgtccccacctccttattagcaatggtagatgcggcagtcggcgggaaaaccggaataaatacttccctgggaaagaatctagtggggtctttttatccgcctagcgcagtaatttgcgacctcgattatctacgcactttaccccttcgtcagctgcgcaccggcttggcggaagtcataaaatgcggttttatcgctgaccataagatcttggagctactgtcgaagtgcagcgcggaagagttgcttgcctccccggcgatattagaagaagtgattagtcgcgctatccaagtaaaagccgctgtggtcagccaagacctacgcgaaagtggattgcgggaatgccttaactatgggcacaccctggcacacgcaatcgaaaaagcctcctcctatcaagtgctgcatggggaagcagtggcgatcgggatggtgtttgctgcccaggtggcagtagaaatgcagctacttaccccctcgcaaatggaaagccagcgccgccagattgccgcgctggggttgccgacaagctgcccgcaatattctttcgatcagctagtaaaaattatggcctcggataagaaagtgcgcggaggaataatccggatggtactcacagccggtagtgggcaagtgcatgtggttcccattagcgactaccagctactgcaaagtgctttcaacgccataaatcaagacgaggatgccggtggcggcaccgtaaatcctagcggtggaaaggacgaagttggctaggaaagttttcttaatcggtctgccgggcagtggaaaatcgagtattgctgccgctttagccaaaagatttgggtggaaactggtagatacggacgtactggtagccgagaagttgggagtgccgctagctactgcggtgattagcgccggtgaaaaaagctatcgtcaggcagaacaggaagtcctgggcgccctcttaaaagaaatgcccgctaaagacactatcgttgctatgggttccggggcgttagataacccccaaacccggcaaaagctagctgaacttcctggtaaagaaataatagaactggtgatagatctgtctactatggctgatcgcgccggtctcaatcgtcctcgctccctaggattggggatgccgagggcgtggctgcgacagatggggcaagagcggcgagaacgttggcagattctgaatcccctggcgctagaagtttcagatttaacgctggagcaggctgtcgaaaaagttgcccgcgtcctggtagcgtgaccaaaaacgcagctcactggcacttattttcatgcttagcttgattaaagtaaagtagaagcgatttattttgacttgggggtattaagttggcgacaacaaatgatttgaaaaatggtctggtgctaaagctggataaccagttgtggcaggtggttgagtttcagcacgtgaaaccgggtaaaggcccggcgtttgtgcgcaccaagatcaagaatgtacttagcggcaaaactgtggatcgcaccttcaatgcaggagtgaaagtagaaaccgctacggtcgatcgccgggacatgacctacctgtatcaagacggctcagatttcgtgttcatggacgatgacacctatgaacaggtgatgatcaccgcggaaatcgtgggagacgccaagaacttcctgattgaaaaccagcgcgcggtagtagctttccatgacggacaagtattgttcctagaactgcctgcctcagttattatgcagattacgcacacggagccttggctacagggcaaccggtcttcggcgggaactaagccggcgactgtagagaccgggtatgaagtgcaggttccgctgtttgtggaagatggcgaaaagattaaggtcgatactcgcagcggcgattacatatctcgggttaaggaataaccgaaggtgtccaaaaatcgactttcgcggcgtactaaagcgcggcggcgggcagttgataccctctacgaagctaatctcaaaggtctagatcagaacccggaggatatacgggaactgatagcgcagcggcaacgtttaagtactgcccaaactactttgcccgactatgcggcggaaatcgcccagggggtggctgagcatcttttcgacatcgatatgacgctcagccaatattcccaggcgtgggcacttgatcgtatgccgaaaccggatttagccattttgcgctgcgcactctgggaaatcctctacaatgacgatgttccctggaagattgcggtagatgaagcggtaggcactgcgcgcgcgatttcaactccggaatctccggattttattaacggagtgctagatgctatcgggcgctccagtgaaaataactcaagcgagcagtagcgaaagccgccagcttagggtgcgcccttgccacctcgactgctcacggattttaggaggcagtcatgagtgcaatcgtttttcgcggcgccaaaatcctgggggaaagccccgcggacattctggtggaggaccatgaaatccgccaggtaggcgcggacttagcgctaagtcctggcagcggaattcaagaagtagatgcccacgggatggtggcactaccgggactggtggatctacatactcatttgcgcgagccaggcggatctgatgccgaaactgtagacaccggcaccgctgccgcggccaaagggggatatacctgtgttttcgcaatggcaaatacgactcctacccaagattgcccgcagatagtagagcaagtccttgatctgggacgccaggcgggtcgggtagatgtacatccggtaggggcagtcactaagaacctagccggtaaagagctttctgatctacggggaatgcatgaatcgcgggcagccgtaaatgtgtttagtgatgacggtaaatgcgtttttgatccgctactgatgcggcaagctctagagattgtccgtgattttgatggggtaatcgcccagcattcccaagagccgcgtctaaccgaagattcgcaaatgaacgaatcttacctggcgaaagagctggggctcaagggctggccgacggttgcagaagaaatgattattgcccgcgatattttgctttctctctacttggatgtgcgggttcatgtttgtcacctttcgagtgcgactgcggtggaactggtgcgttggggcaagtcccaaggcgcgcggatcagcgcggaagttaccccgcatcacctgttcctcactcaggaagaactacgagggcgggatccgctgttcaaagtaaaccccccgctgcgctcacaaaaagacgtcgaggcggtgcaggcaggattagcagacggcacgattgacctggtggggacggatcatgcccctcacccccgcaaacttaaagactgtgattttgagtgtggcgctttcgggatgattgggctggaaaccgcgctgccagtggttgccaccactatggtgcaaagcggaaaaatgacttggcaggatctggcacgggtaatgtcggttaccccggcaaaaatcgggaaagcgaagggtcaaggtgaggagatcgctcctggctctaccgcgaatctttgtttcatggctcccgatgcctcttggatagttaaccgcgagagccaagtttcgcgttctgataacaccccctttgcgggcaaggaattggtggggcaggtgcgtcacacctgctaccgcgggaaactgacggtacttgatggacagttgcagttttaaggaggagctaaaggttttatgaatcgctacggtgtgcgcctggcagaggcgatggaaaagttcggcaatgtgtgcgtaggtattgacccccatccctcacagctgaaagtctggggactcaatgacaatattcaagacctccgcactttttcgctaactttggtggaagctatggccggccaggtgccggtagttaaaccccaatccgcgtttttcgagcgtttcggatctagcgggatcaaggtgctggaggaagtgctggcagcctgtcgccaagcggggctgcttgtcatcttggatgttaaacgcggtgatatcggttctacgatggccggctatgcgcaggcatatttaagccccgattctcccttggctgccgatgcgattacgctttctccctacctgggtttcggttcactgaagcctgctctcgagctcgccaggaagcatggcaggggagtctatgtgctggcacttacctccaatccggagggattcgaggtgcagcatgccaaaaatgcgagcggcaaaagcgtggcggccgacataatttcgcaggcagagcagataaataaaacctgcggtgatgaaggtcacatcgcagatattggtttggttgtcggcgctaccaccggaaatgctgcaaaaaacttgaggattgatttttcggaattttccggatctattttatcgccaggaattggagcgcaaggggcgcaaccagcggatatacaaagaatctttggtaaaagtgcttgccgagtcctggcatcaacttcgcggggaatctcctctgccggtccggacgtctcttccttacaagccgcggcaagacaaataaccgagcaaatgagtgatatttttcgcaactgaactggcaaaacttcgcgaatgggttggcttaaatagaagaaagcaactaatctttttcgtgttgttaacccgtaaatctagatgaagaggtaaatattaaatggcacttccttccttaactcccgaacagcgcgcacaggctctggagaaagccgctcaggctcgcaaggctcgcgcggaagtcaaagctaagctgaagaaccgggaactgaccctttctgaggtcatcaagaatgctcaagatgatccttacttgggcaagatgaaggttcaggctctgctagaggctctgcctcgcgtaggcgccaccactgccgccgcggtaatggaagagattggcatcgccaagtctcgccgcattcgcggtctaggcgagcaccagcgcgccgagctgattcgccgcttcggctaaataaaaccgaaaagctataaaatacagtatgggacctgagaaattgggtcccatactgttattttctactggctcaaaaggtggaaactttgccgaactcacgtttatatgtactagctggcccctccggagtgggcaaaggaactgtggttaacgccctgagaaaaatgtatccgcaggtaaaagtggcagtttctgctactacccgcgctccgcgccccggggaacgcgacggcatcgactactatttcctcagcgaagaacgcttcgataagctacttgctgccgacggatttctagaatgggcgcaagtgcacgggcgggctcgctatggcactttacgctccgaagtggaggaacactctagtcggggcgaagacgtgattttagagattgacctagcgggagcgcggcagattcggcgcacgcatccagatgcccactttattttcctgcttcctcccagccaacaagccctagaagagcggttgcggggcaggggtaccgaggatgacgcagaggtcgctcggcgcctagaaaccgctaaaatcgagctggcagcggcaaaggaatttgagcaccagctaattaacgatcaccctgaacaggcggcgcgcgaactagccgccttaatgggaatagcgtaaactttttgtgaagatgcggcgctgcgccgctagtttagaaatgagaggacaacatgtcgggtactgttgctagccccgaggggattaccaaccccccaatagatgatctattggaaaaggtagagtccaaatacgcccttgtggtctacgcggccaaacgggcacggcagatcaatacttataatctggaaatcgcggagggaatgttttctactcctggtccgctgatcgactgcaatcccgaagataaggcattgagcattgctttacgcgaaatcgatcaagacgccctcaatctgaaagaacatgacgagtcggtaaaggactaacccatcatgtctgagcgtcgccggatcattcttggggtgggtgcgggtatcgccgcctataaaaccactagcgtggtgcgcgccctggttaaatccggcttcgatgtatgggtgattcctactcctgcctctttgaaaatggtgggggaggttacctggcaagcgctttcgggcaatccggtttattcgcaagtggatgaacctccaagcggggtcggacatattgagctggctcgtgatgctagtgcaatcctggtagctcccgccaccgcggatcttttggcgcggatagcgcacgggattgccgacgatatgctcaccaatgtaattttggcagcaagctgtcccttactgctcgcaccagcgatgcacaccaatatgtgggaaaatggggctaccaaggataatgtgcaaatcttgcggcagcggggagcccggttcattggtccggctacaggagcgctttccagcggggaccagggaataggccgcatggcgccggaagatgaaatcgtatcccagacgttggcggtgctgggttctggcagttggcaagatcagaaagtcatggttagtgcgggaggcacccgggaaccgctagatccagtacgtttcttaggaaatcgttcctcggggcgcttcggaatagaaattgcccgcaactttgcccttcaaggggcgcaagttactttgttggcagccaatatcgattcggcactgttagcgtcactacccgcaaacatcgcggttatttccacgcccaccgctgcccagatgcaccgagcagctttagaacagttccccaaaatgcaggtagcagtgatggcggcggcagtagccgactatcagccagcagaattccaagcccaaaaaatcaagaaaatccccggtcaaaacgagttttctttacagctgcgtcccactgccgatattttggcggatttggcctccaagaaatctgatcagcaactggtggcgggatttgctgccgaaactggatcttgggatcaggttgtgcagctagggcaggaaaaagctcgccgcaaaggtgccgatattattttcattaaccaggtgggggagagctctggattcggggatgtgactacgcgggtcagtgcagtcgaccagcagggcagcgaaattgggcagttcgcgggggataaaagccagctggcagcccagatagtggcgctgattcgccggcaagtccagtgaatgaccaaatgccgcgatggagcggcgtagaccccctgctcaagatccgctctctcaaacagggcgagcaggaaaacggtcagcaacaagaactacttgtggcaccggaaaaacctttgccgaaatgggaaaatcaggattcaattgccacggttattcccgatacgcccttgtttcatttagctaggggattagactatacggttcctgcgcgcttggctgggaagattcagcccggatgcctagtgagcataaagataggggagcagacgctacgtgcttgggtgaaaagtattcgccccgccgagccgacccagcaacgtttacgcgccattagccgggtacttagcccccatcctttagtttctgtcgctagtttcgaactagcagaacaggtggcctcccgctatgcggggaacgtttcccaagttttaactcacgcgattcccaaacgccatgccagtagcgaaaaagagttttttgcctccgttagcaaaaaatctgcagccgaagccgcgcagaaggttgctaccgatctttccagctccttcgcgagggcgaaaccgctgatagccagctacccgagcggaaaggaactgctggaatcactggggaaagcaaaagcctgcaaagtggtgtggtcagcgctgcccgaacccgataagcccgcgccctttaaccagatctcccagctaatagcctccgctctcaaagctccgggcagcgtactttgcctatttccaaccgggcagttaaccaaagcgtttagttcttattgggagaaaaactccccggcaggggcgccctcagccctggaatatcactttgatttgggagttagtgagcgttaccgcgcctacttaaagtgccgttttaaccagcctcgcctggtagtgggcactcgctccgccgtatttgcgcctttaaagaaactatccttgcttttgatttgggatgagggagccgagactttccaagaaaaagctgccccctattggcatagccggcaagtaggaatgctacgggttggaagtgaaaaatgttcgttaattttagggagtttttcgcgatctccgcaggcacaagcgctagtaatgtctacttgggctcacgatttaacccctcgtaaacaccaaatccagctgcctaagattttcacccccgaatatgaagatcgcgatgaccccagtatcggacgggttgagttatcctctaccgctctacaatttgtgcatcgttctttaaaacacggtccggtactaatccaaaccgcccgcaaaggtggtcgtctcggtttaagctgcgcaaactgcctagcaccggtgcgctgtccgcaatgcttcggcaccgtgcagcaactgcgggtcgaatttatttgtaatagttgcgctcatcattttgagttccgttgctcgcgttgcggtaagcaggaaactagggcagcggtgcgcgggaataaacgcattggggaagaaatcgcggcggccttcccgaaagtatccgtgattaactgtgatgctgataatcccttgaaccatatcggttcccagtcggcattggtggtagcgaccaatgaacaggaaccggtagctgaatccggatatgcgggagcgttgctgctggatgccggaatgctgctgagcttggatcgaatttggaccgccgaagaagccttgaggcggtgggcgaatgctgccgccaaggtggctcccggaggccaagtaatgctgagcggagatcccggtgaacgtttagctttaacttttaagcaacgcgcatttagccagtgggcaaggcaggaactgcgagagcgagcagaagtaggaattcctcctaccgctgctttggctactatccgcggcagtcagacagccgtggataaaatcaatcacctcgccgactttggggatgcgcaagtaatcgggccaaccagaaatggcgaacagtttcagttactagtacgctcccgcctagatcaggggcaggcgctgcgccgcgaacttcaacgcattcaagcggtggcttcccgtaagaagtggggctcccttaaagtgcaggtagacccgatagatctttaatgttccaggtgatggaaacagtaaactgatacgattgtgctatgcgtgtcttatttgccggtacccccgattctgcggtaccagtcctcaaatatttgctcgaatccgagcatgaagtagtcggggtacttactcgccgccctgcccactcgggcagaggccgccggctttgtccttctccggtagcccaagcagctgaagcagcaggaatcaccgtttacaccccctcatctttgaaggacacgcagcaacgcccggattttgcggcactcaatgccgacgtggcagtagtggtagcctacggcctgctgattcccaaagacctactcaatgtgtttcctcatggctggattaacctccactattcgctgcttcctaaatggcgcggcgcctctcccgtacaacattcgcgtatggccggggaagaaatcaccggggtcagtattttccgcattgacgaaggaatggacacgggaccgatttttgcggttgaccctatccgggttgctccccaaacaaccgccgatttactgttgcaacggctaaccgataccgggattggtttattgccacacgttttaggggcgttggaggccggaagggccaaggctcatccccaggccagcgaaggagccagctacgcacccttgctacggaaggcagatgcccagataccttgggagaaaagtgccgaagaggtcgctaatctgatttgcgcctttacctcccaaccgggagcctggacagtgcttcccgacgggaaacggctgagtgtctatccggtgatcgaaatgaaagaccatgacacactgcagcccggccaggtactggttactaaacatgaagtcaccgtgggaaccggcagcaacgatgtaaaactcacctttgtgaccccggctgggaaacgggaaatgactgctgacgcctggggacgcgggcaacattatggcgaagaattttattttgggttgcccagccaaaatgaggagaaccagtgcgagtagaacggagccaaaaaaaatactcggcgccaaagtcgcctcgccctaaccggcggcgagaacggggggaatcgcgcgatcaaaacgagcagtggcgtccgcaaactgaccgggtacgtaccttggtttttcaggtactgctggcagtagaaactaaagattcctatgctaacctgctgcttcctccgcggcttacccgcgcccggattgaggggcgggatgccggttttgccaccgaactcacctatgggacgctgcgctctcaaggctactatgactggttaatcgatcagttttcttcccgtccggtggctgccctagaaaaagaagtattgattattttgcggatggggctacaccagctgctaaatatgcgggtacctactcatgcggcggtcagtgagtcggtgaacctcactaagcaggaagttaatgagggggcagccggcctggtaaacggagttttacggcaggtagcaaggctaggagagggcgagctggaagctcggttaaaccggcttagcccccagcgccgcctcgctatcaaatattcgcatcccgcctggattattgccgcctatcgcgcggcacttagggaacaagaaaaactaggggctcagattcccagtgacgatgattctctagcggcgttactggcggaaaataactgtgccccctatataaatctggtggccagacccggcctggttgaccgggaggaacttgcagatgcagtggaggaaaacgggcaagacgtagcctattcaacgattagcccctggggtttgattgtttctgggggcgaccccgctgatttagcagcggttgcttccgctcgcgccggggtggaagatcaaggatcccagctggtggcagggctggccgcgcaataccccctggaaggtagagatcaaatctggctagatttatgtgccggaccgggcgggaaagcagccttaatggctgccctggggcgccagcgcggcgcagagctaatagcgaatgagatcagcgatcaccgggcaaaactggtagaggactcagttaaagccctagataatgtgcaggtagtttgtaaagatggcaccaagtttccgcttcgtgaaggcggatacgaccgggtgctagtcgatgccccctgcaccgggctaggggcgttacgccgtcacccagaatctcgttatcgctcccgcaatgaaaccattcccgatatcaccgggctacaggcaagtctgctgaaccgtgccctagaactttgccgccccggcggtctggttacttatgccacctgttcccctcacccggcagaaaccaccttcctagtccagcgggtcctaaaagagcatcaggacgcgcgtttgatggatttatcagaaactttagaacagctagttgacgcacaatcctggtctgaaggcttgggctgcgcacctaaatacctgcaactatggccccatattcacagttcggacgcgatgtttgctgtggtgatcgccaaagaacagaaaggaaactaatcatgggcgtaactatttctccttccattcttaactgcgatatcgctaacttagctagcgaaatcaaaaagattaccaacgctgactacgcgcacgtggacgtaatggataatcactttgtccctaatctttcctggggactgccggtggtggaagcagtgatccgtcaaaacattttgccggtggacgcacatttgatgattgaggacgctgaccggtgggcacctgcctatgccgaggtcggttgtgactcggttactttccatgcggaagcggcagtggcgccgattcgtttggcgcgcgaaattcatcgtcaaggagcaaaagtggggatggcactgcgcccggccaccgatatcaccccctatattgagttactgcccgaaatcgatatgttgttggtgatgaccgtagaacctggctttggaggacaaagtttcctggagtctatgctgccaaaaattcggcgtacccgcgacgcgatttccgcggcgaatctacaggtaactgtgcaggtagatgggggaatcagtcgcgatactattgctttggctgccgaagccggggcggatgtgtttgtggcgggctcggcggttttcaaagccgaagatgcctataacgaggtagaagcgctacgccagcttgctaaagctcactgctaaaagcgctagcggttctgctattagattccggcaatcctcctgatttctagataggttccgggggtatctgctatccgcaagtggaacggcaaggcaagatttttcaaaaccaactaaccttaaggctatgaagagttttgaagagttatttgcggagctgcaagaaaaggcggctacccgtccggagggatccggcaccgttcaagaactagatgccggggtacacgcgatcgggaagaaaatcgtagaagaggcggcagaaacctggatggccgccgaatatgaaagccatgatgatttttgtttagaggtgtcccagctgctttatcacgcccaagtgatgatgattgctaaaggggtcagccttgaagatgtctaccgcaaactctaggggaaaaatgttacgaatcgcgattccaaataaaggtggtctttcggagcctgccataaaaatgctttctgaggccgggtatcgcacccggcgacgcgggcgggaactgtatatcaccgatgaaaataaccaggtagagatattttttctacgtcccgccgatattgcccaatacgtgggtgccggatttattcaagctgggattaccggtcgagatttactggccgactcgggggtaaaagcacaagagttattgccgctagaatttggaaagtctactttccggtttgcggctccccaggacactatcagcaccattcaggatttagagggcaagcgcatcgctacttcctttgaccgaatcgtccaggattatctagcgggacagcagatagaggcgactacggttcacctggagggggcagtagagtctgcggtgcgtctgggagttgcggatgcgatcgcggacgtagtggaaaccggaaacactttgcgcgctgccggcctagaagttttcggggagccgctgatgaaatcagaggcggtgctaatcgctaatcctcaggcatctaaccccgggctagaagttttaaagcagcgtttaaggggagtgctcaatgcccgcaactatgttttgctggactacaatgtgcgccgtgacctgttagatcaggcagtgcgttacacaccgggaatatcttcccctaccatttcttcgctgcaagatagcaattggtttgcagtgcgtgccatgtgtaaacgctctgaggttcacggggtggtcgataatctccacgccctgggggcagaggggatcttggttacccaattgctatccgctcggatctaggcaactgcctggcgcgccggacaccggtttatcgcctgaacagtagagtagccgcggctcagcgccgcctggcgagatttcgccgttagtcttcgtctagagcatttgcgctgctagacgcccagcaaccgcagctgctaggaaaggcgcagcatcttcatcaagagaacggcgcatagtagaaagccgtaccgggcactgacttaatgcctgatagaggccggcagttgaacatttttgtacccggtgccgagaactaatctgcttcacctgcgaatccactatctgggtaaagtcactggttaaaagcggtttttgcccttcgccctcatcggtaaactctggaactggcaccgtaatgggaaccggaacaaaactggagataatccgcaggctgtggtgggatattccctggtggcgggggcgtaaatctgctgccgacattcgcagggcgcaaatggctttaccgccccctaaagccgcttgggttaaaaacgccccgaggtcgaaaccggaatacccataaggggtgccggaaccggcgtttccagggccttgtcccataatcgcgatatcagcttttaaaacctggcgggcagcgagcaggccggaaaaagtgttgatagcctctagatcacccccgaaggattgacccgcggtaatcactgaatccagccatcctttttcgcgcaaagtggtaatgttacgcgagaaaaatgccggtacggctccgccatcggtatagatatagacaatctttgcttggcggttttctgctctaatcccgacaatgactgcggggagctgagagtgtagatccatacccactaccggcattccatccaggttttctgcctgccgcatctgctcgtggaagggagattcttgttcctcaaccgaagaaaccatgtattggctgggggtatagcgggccttcataatgtgaccgccgtgagtgggaagttggtcttccggtaggcgcccacaaagcgcggtcaccagcgcgaatccgccggtacctaggtttttctgcaggggcgagcagtcaaaacgtacttcatcgccttcactaacttccccgttcagggcgggatagtttaaggcgcgcaggttttccccggttaaaaattgttttgcgcccgcggggtgagcagagatctttactgtaagttcttgtgtagattcaaagttgcggacagcttctacgtgtccttcccgtaacatcatgtctttattctagccaagcgtgagggtgaccgccgggctaataaacaggtaggctagaggtatgtattggtttttgtttgcgctttggacgctggggattctagcggcgattatttgcccgatcgtgatgttcatctggctgtttcgcaaagccaatgcaactttcaaggttttcggggatcaggtagaggcagtaaccgctcccttggataacctgggggaggcttcgctacttccggagctacggccagcgggagccagcggtgatccccaggtactggcgcaggctcgtcaggttcgcgctgaggtggctgcaactcgtcgtactcgccgctatgcccgcctcaatgccgccaaacagcgctgggagaaactggggctggtataggtgccgcgaaggcgtaaacgaaaaaaatctgctgctaccgcgagcggaaacgattgggaatctctgtcagcggcggaaaagttagcaactttcaaacgaaaccagataaccggcgaggcgggacgtttcgctgctcgtttcgattttccttttgatgattttcaacagcgcgccctgggagctctcgaggacggaaaatcggtgttggtggcagctcctaccggatccggtaaaactttagtgggggagttcgctcttttcttagcactaaaacggggggtacgagctttctataccactccaattaaggcgctttctaaccaaaagtttcgggacttttgtgccgcctacggcagtgaaaatgtagggcttttgaccggcgatgtttcggttaatccgggtgcttccctggtggtgatgactaccgaagtgctgcgcaatatgctttaccgtcaggacggtcgcctagatgatttaggtttcgtagtcctcgatgaggttcactaccttgcggatcgctaccgcggaccggtgtgggaagaagttattttgcatctggatccggccgtgaaagttatcgccttatctgccacagtttctaatgctgaagagtttggacagtggcttcggcaggtgcgcggggatgtttcgattgtggtttccgaaaagcgtccggttccgctttaccagcatatgttggtaggtgggcgcctatttgacctggaagtaaaatcttctgggggtaaaaagaaacttaacccagcgctgctagcacaaactcgacgctttctgggggagccgcggcgcggtagtcacacttctttgccggccgcagtgggggagttaaacgctaaaggtctgctgccagcgatcgtttttattttttctcgcgcccgttgcttggaggggcaaaaacaacttgtggcagcgggaatagacttaactactccggaggaaaaacgccagattcaggcgcgcctcgatgaaatcagtgagaacattcccgccggtgacgtcttcaccttgggattcgactctctgtttgcgggactactgcgcggcatagcggtgcatcacgccgggctgctgccggtagttaaagaagcagtcgaaaaaatgtttgcggcgggtttactcaaagtagttttagcgactgaaaccttggcgctgggaatcaatatgcctgcccgctcggtagttatcgaatccttgcgtaaatgggatggtcacgagttcgttatgctttctgcggggcaatatacccagctgacggggagagcgggccgacgcgggatcgacaccttaggtcacggaatcgtaatcttccgtccgggcatggatccggctatggtggcggcgctagcttcaaaacgcacctaccccttgaaatcagcttttagccccacctataacatggcggttaatctgctggagcgaggctccctcgcagatacccgcgatgttctgcggcgctcctttgcccagtttcaggccgaccgatcggtggtggggaaggcgcagcaagcagcagaaaagcaacgcacagctgacaaaatagtagccgcaaaaactctggaatgctcctttggcgacatttacgaatatgtgcggcttaaaagcgagctagaggcacgtgatgctcgccgcgcgcagctgcttgcccgcgagcaggctaggcagcgcaacgaactttttagttccctaaaacgcggggatgttttggcctatcaggatggacgccgcgcgcgtcatggaatcgtgatgaaaaaatcgcatactcgcaccggggaaaccactttgacggtgcttgcagacaacgccaaactgcgtgatttttctagtaatacgctcactggcggcctggccctggtgggacaaatgtgggtaaaagattactcggaacgtaaacctcgcgaccggcaacgtctagcttctaagctgcggtcggcacttcgcgacggcctatttaccgatccggaaacctcctcacaagaccgcgcggatgcggcgccttcccccctaaaacccaaggtttcgactcagaaaacccagcaaaatagggcgcagctggctgataccggccgagagctaacggagctcagtgctctggagttaaccgagatgatcgcggagcatccggtagctagctgtccgcatctaaatagccacttaaagaaagcttcccattgggcgcgcctggagcggcaggcagcccggctgcgtaggcgggttgatatttccgagggcgccttagtagacactttcgaccgggtagtgaaagtgctaactcgcttaggctatctgaacaggcagggtgaggtcagtgaatccggagcggtattgtgccggatttacagtgaatatgacctgctgattgcgcaatgcgtgctcaaaaatgttttcgcggggctaactccggcgcagctggcggcggcgtgttcggcggccagttatgaaccccggcgacaggagagtggggcgccggtgccttctccgctgaagtcggtggttagccagattgagtatttggcaactgaactgcgggagctgcaaactaagctgaaagctcccgaaatcccggaggcctcttctgcactggtggcagctacttatgcctgggctcggggtaaaccgctggcggtggctttagaggccggcgattttgtgcgtgctatgaagcaactgctggatgtgttgcgacaactagaaatggtggccagtgtggaaacttccgctaccgcccggaaagctcaaaaattgattttacgcggagtggtggcatggtcggacgtttaatcaaaggcttttgggcggtggtggctgccgccgccatcgctttaggtttgctgctggctttcccttctgcttggggatcatattggctgtgcgcttggttagctatggggctctggttgctgatcttgcggcgggtacgccgccgctacgccctggcgatttccgccctggccgccctgatatttttcctggtgctcttccgttgggtgtccgtatcgctcggtttttctaccccttggattgcgcttgccctttgtgaaaccttgtttttaaccctgtgggcagggtcggtactggcagtgcgacgcttaactagtcccctctggactttatggacggcgttttcttttgccgggatcgaggcttggcgcgccgcctttccttggacgggtatgccttggggaatgctgggattctcgcaggtagatagccctattaagggctggataccgctgctgggagaaaacgggatggctttcttgatggtggggatactggcggcgctagtaagcgtcacctggaaaatctcgatgcctaatttggtgactgccggtctggcgctgctggtagtgattgcctcgggatcgggtcttccttcccttcccagctcaaaagattccccaaagctgcaggtagctgccatgcaagggggagtgtcctggccgattggttctacctattcccgccccggcactattttggcaggccatttagcgcaggcgcgtaacagtgatttaagcggtacccaactagttttatggggtgagcaagccgcagatattgatccccgctcggatgcggcatggggtaaggagctgcgcgcttggcaagccgggcagcaaatcccgctactttttggcaccctggtttaccaagagaaaactacctctaaccaggtgctaaaactggaggacggcagcttctcgcaggtttattccaagcgggaaccagtaccttttggggagttcttgcccgcccgtccggttatttctaagatcttccccgagcaggtaaagatgctgccgcgcgatatgataccggggaaaaagcctggtgttgctgcagttggggatgctcgcgtgggggcgaatatctgttttgaggtggcgctggattccctggtgcgcgatacggtaaatgcgggggcgaacctgctatatttccccactaataattcttctttcgggtactcttatcagtcccggcagcagctgcaaatagctcggtttcgcgccctcgaatatgatcgctcttccgcccaggttgccgtggggggagtgagcgccctagttaatccggaagggcaggttttagcggggtccggactgttccgggccgacactttgaaggcggcgctgccgctgcgagatacgcttacctttcaggcgcgttttggctccggtctaaacgctttcttccgtttcggggtgatagtagggctattgctagttgggggagctcttattttcttgaaggtacaaaaacgtagtttccaacatttagaaacagctgcccgcagcaggcgaaaagctaaccgtaaaactgggcgcgggcgcctaaagagcggttcaaaaggaaaaggaaagaaatgacagatacggtaattgccattcccacctataacgaagcggaaaccttgccgcgtcaggtggcgaaattgcgcgctgaggttccgcaggcagatttggtgattgttgacgataactctcccgatggtaccggtcagctggcagaggagttagcggctcaagataggggagtgaaagtagtgcaccgggcagaaaaagccgggctgggtcctgcctatctggaagcgttttcttgggcggccgaagccggatacacctgggtggtgcagatggatgcggatggttcccatcgggtgcgagatttgaaaaaactgctggcgcgtcggctgtggccaagtgagccggatttagtgattggttcccgttggattaggggagggcgcctgcagggctggtcccggctccgagaagcgctttcgcgggcaggtaatgcctatatcggagcctggctgcgtctaggcatcggggatgctaccgccggttttcgggtttaccgactagacttccttagtcgcctggggctggaggatctggattcccggggatattgctttcagattgatatgacccgccgcgcggtgagagccgggggcaagattgtggaagtgccgattacttttcaagaacgggctgccggagcctctaaaatgtccagtgccattattttggaggccctagctaaagttacccgttggggactaagcgacctgataaaagaccagaaataaccctggctaccgggtatctttcaggcgtcttagctgtagtgtactccgtccattagtgctccggagtgaagtacctctagctgctcttctagcagttcctgcagttcttcttcactgcggcgctccaagagcatatcccagtgggtgcgctgggggcgtactggtttcgcgtcctcttctacggccggttcttcgtattgcagttcccccatttcaccgcatttgcattcccactcggcgggagcgggaacttccgcggcaaaggtcatgtggaaacggtgtccctgggggcaaatgtagaggctttcgcgtctttccgcgaatactacgccgtcctctgtctctaggctctttgaaccgatacttgttccgcgtagtgcgcgctctgccatagtaaaacccttccttgccacctgtgctagctacccagcaaataccgccctattctaacaggtggcttcgcacagttcgacttttattctctgcagcttgctgaaccgattattgaaaatcgtattaggaacgtacccgtgctagagaccgcttagccgcagcaactacatgctcactgtctagtccgtagtgcgcaaatagctcagcggcagcgcctggcagaccgaagtcatctaaaccaatactttctccattgtctccaactaggtcgcgccaaggatcgaccaaaccagcctcaatcgaaactctggccttgaccgctgaaggaagtacctgttcgcgataggcagcatcttgcgccttaaaccattccatacagggaaccgacactacccgggcagcaatcgattccttcgccagcgcagcacgtgcctcgagggcgcattgcacctcggatcctgaagccagcaagattacctccggctcgccctcgctatcagcgagaacataagcacccttgctgacattcttggcgctggccaaagcatcagctccggcgccttccatatcttcgcgctgatatacgggcagagcttggcgggttaaaatcaggccagccggaccgtgctgacgcaaaactgccagccacgccgccgcggtttcattagcatccataggacgcaccatcgccagattagggatagcgcggtaggcgcttaaatgctctaccggctggtgggtgggaccgtcctcgccaactccaatggaatcgtgggtccacacataggtgaccgggatattcattagagcggccaggcgcacagcaccccgcatatagtcgctgaacacaaagaaggtacccccgaatactcgggtgagtccgtcaatggcgatgccattcataatcccgcccatgccgtgttcgcgcaccccaaagtgcagcacccgaccaaaggggttccctttccacatatcagtttgtgcggattccggaataaagctgtccgcaccggcaatcgtagtgttattggaaccagctaggtcggcggaaccaccccaatattcgggcatgactgctccgattgcggaaataacttttccagaggccgccctggtagccagggattctccggcgggaaataccggtagcgcttcctcgataccttcgggaagtttaccagctaaaatccgttctaagagcttactcttgtccgggtttgtttgtttccattgttcaaagcggggatcccaatcgccatgagctgcctgagcgcgcgcagccgcattgtcccgagcatgctggagcgcttcttgatcaacagcaaacattttctcgggatccatacccagagcttcttttaatccttttagttcagtttcacccagcttcgcaccgtgaatagcgccagtgttctgcatagtgggcgaaggccagccgataatcgtgcgcaaagcgataatcgaaggacggtgcttttctgccttggcggcatttatagcctggtcaagggcatctacatcttcacggtagctgccgtcttcctgcaaccaattgacccgttgggtatgccaaccataggactgatagcgggcaagcacgtcctcttggaaggaaacgtcggtatcgtcctcaatagaaatatggttatcatcccaaatcacaatcaggttacccaggtcttgtacgcctgccagcgaagaaacttctcccgaaattccttcttgtaaacagccgtcaccagcaattacgtaaatattgtggtcaaaaggactttcacctaggggagtatctggatccaacatcccgtgcgcacgccgcgatgccatcgcaaaccctacggcagcggcaaatccggagcccagcggcccggtagttacctctacgcccttggtgtgacggtattcggggtgaccgggagtgtaggagttgaaggtgcggaatttctttagatcttccagctccatactttgaccggctagatacagttgaagatattgcagcaaggaggcatgcccggctgaaagcacgaagcgatcgcgccctaaccaatcggaatcttgaggatcgaaacgcaagtgacgctgatacagcaagtaggcgaccgctgctagggatatcggagttcccgggtgtccgctaccggctttttctactgcatcgccggataatgctttcgccatattaactgcgcgctgatcaagttcattccaatcggtagccatttttgttccttctaacctcggtttacttgggaatatatcttgcctcctatgctagcagttttctcagagagggatgcggctatgaattattttttataaagcgctaccgattttagattttcctcgaaaccgcaatccgataatgtacattatgtcaactaaagggtatggagacgaacctgcccccatcccctcccacacgtgttacttccagccgttttgagtttgcgggctccaagggtttgaattgcaagcgaagttcttcccgattactaataaggagagtttgcaccatggcagctgatgagccgctgaacccaccgctaaaggctttaggtgattccctagaagccgaaataaagctaaaagatataaagaaacacccggttaatcaggtaccttcggctccgcggactgcgctgctctcagtgcagcatgtgctggcgttttacgccggtgcggtggtcgttcctttgattgtcgccggcggacttaaacttgatgcggccaccacggtgcacctaattaacgctgacttgttcacttgcggaatcgctaccctgattcagtcaattggtttttggcgtatcggagtccgtctgccgattgtgcaaggggtaaccacgatggcgatctctccaatgatcgctattgggctggcagtaaatcaaaacggcggcaccgaggtactgcccactatttatggtgcggttatcgtagccgggctatttaccttcttcgcggctccactctttgccaaactgatccgctttttcccgccactggtgatcgggattgtactgaccactatgggcaccaccttgttgggagtatccgccgccgacgttatcggacgagttgacgaacaggtaccaccgatgccgataactttgcgttctctagcctatggcctgggaactttagcgataatcgtattaatccaacgtttctttaaaggctttatgggaactctggccgttcttgcgggcctagtaatcggtaccggcgtggcggctgcgctgggcgatacctcgtttagtgaagtaggtaaatcctcttgggtagcggtcactaccccgttctatttcggctggccacagttctctttaaccgcctgtatctccatgatcgtagtaatgctactgaccatggtagaaaccaccggtgacgtctttgccaccggcgaaatcgtgggcaaacgcatcggaaaagaagaaattactgcagccttgcgtgcagatggtctttccacaactttggggggaattttgaactctttcccctacacctgtttcgcacaaaacattggtttagtgcgcctgaccaaagtgcattctcgctgggtagtagcgtgtgctggcggaattatgatcattttgggagttattcccaaagcgggcgctatcgtagcctcgatcccctctccggttctaggcggagcctctatggctttatttgccaacttaaccttagtggggattcaaaccttatcccgagttgacctgtcagatacccgcagcgggattattctgaccacttcgatcgcgctggccatgctagtttccttcaaaccagcaatcgcggatgccttccccgcctgggcacacattttctttgcctcgggagtcaccctgggctcaatcagcgccatcctactcaacctcctattcttccacgtagggccgcgatctaagggcgaggacgtggcgctgggtactaccggcaaacggcgttcactacgggcagttaataaaatgagctccgaggagtttgtaaatacatttgcccgcttgtttaatggggtaacttggccactgcaggcagctgcggagatgcgtcctttccgggatgtaggcgaacttaaagaggcgttgcaagatgcggtaatggttgcggataaagaggctcaagaccagctaatcgcttcctatccggatgtaactaccatgttgaccgccagtgaaagcgaagccaaagaaatttcgcaggacgtgggatctttggctttggggcagctcacggaagaacaaaaagcacagctacacacgctggaaagttcctaccatgaaaagttcaacctgcccctagtggcactgctttcacggatggatagcgtggacgcgattattaaggacggggttcaccgcctagaaaactcgccgcggcacgaacgggtagtcgccctaggacaggtggtagaggtaatcaatgatcgcctagagattatgatggcggacgccaaccccatccgttcggcttggagccgcaagttcgagcaactcgactaaagcggcagcaaacggctagttaacctggcctaccggggatgcagaagtatcccaagtcggatcgaacccacccggggttgtccatacccgggtgggaagctcccccggcaggtattggttgttttccgaacagaagatcggaccggcaggatcggtagtttgcatctgtgcgcgatagtcgcgcagagccccaactgcccattttccaaggaaaatcaaagccaccaggttaaccagcgccattagcgccgtcgcccagtcagcgatcgaccacaccgatttcaagggcagtatcgccccaatcgcggtagacgcgattaccagcagctttaagggcaaagccgagcggtccactcccacgatgaacttgtagttagtttctgcgtaagtgtagttccccaagatagtggaatagccgaagcaaaccatcattatcatcacgaatacaaacaccacggtttgggtggtgttattagaacctagagatgtcactatcgaatccatagtgagcactgccccatcgtcatgactgtgtttgtcccagaaaggtaccgacatcaaaataatgaaggcggtggaggtacataccagcatggtgtctacgaatacccccaaggcttgaatcatgccttgagtggcggggtggcgcacggtggcgatagccgcggcattaggagcggaccccatcccggcctcattggtaaacaggccgcgtttagtgccggtagtgatcgcggcaatgaacgctcccccggctccggcaactgccggcggcatataggtgtttgactgtccgaaagctcccataaaaatttcccggaaaacaaagggaatccgctcgtagttcaggacaatcaccaagatgcccatccctacatagagcagcgccatcgcgggtgccaagtattcggagaattgagcgattttacgtaccccaccgactactagcggcaaggttaacagcaccagaatcagggcgcttgcccagaccgggaaaccgagatattccgagtttgccagctgagaaattgagttagcttggatcatttcgaagctaaatccataggcgaagattagtagcaccgcgaatacgattccccaggtgcgcgagcctaggccgcgttggatatagaaggcaggacctcctctaaaagtgccatccccattgcgtactttgaacatttgcgccaaggtcgcctctacgaaagcagtggccatccccaccacggccactacccacatccagaaaactgaaccgggacccccggcaacgaccgccaaggcgacaccggtaatcgagccggtgcctaccctatcggcaagcccaatcgcaaaagcctggaaggaagaaaccccgccttcggaacctccccgggagcgagtaatcactttaagcatgtgagcaaacatggttacctgcatgcctttagtacggactgtgagccagatgcccacccccagcagggtcaccattaacagccagaccaccgagttggcgtaggcggtatctaacagtcccgagatagtttcattccactggtcaaaggcacttaaagaatctttggcggccagtatcgacataagttaactccttcgattacacggcggcaggggcatcatttcagtggcttcggcacccattgagtgcgagaagattccctccccgtgggcagtagcccgaaactttttttaatatactcgcgaatttgctcagggaaaaaattttgtttgctgtccgtcagacagatacttcttaatgggagcagacaaaaagcaagtctcgggtttcagtaaggacgcatccgacaagcaagaagttaagaacgacagtgacaccttccaggaagtgcctccccgtagcagtaaccacagcaggctggcgtaaacattggggtttacaccagcctgccttgaaatattctatttttaaccctagctgcagctagcagcgttttttagttcatatcgtccagtttttcttgatgggcgctcataatccgcctttcgtcgcggccgacgattgcgaacagcaagaccgtcagcaccgagaacgcgatgaacaccataaaggttacgttccaaccaaagtggtgaaccaggattcctactccagtggaagccaaggtagcccccagtaggtaaccgaaaagtccggtaaaaccggcggcggtacccgccacgttccgaggcgacaggtcaatggcctgcagaccaatcagcattaccggcccgtagatcagaccgccgattagcgccaccagcaggatcaatacccacataggggtgccttggggagctagccagtagcccaggattgctagcgcggtgcagatagtaaagaaaattcctgcaccggagcgataccccttgaacactttgtcggacatccatccgcaaagcaaagttcccacaatgcccgcgatttcgtaggcgaagataccggccagaccggaaccgatttcagcgtgatgcttttcgtgcatatacacggtaatccagttgagtaccccgtaacgcaaggcatatacgaacacattggccactgccaacatcacaatggtgcggttagtgagcacgtgtttgaaaatcatatctttggcagagattttctcgccgtcatgtacttccactttggcggggtcattgcgatattcctcaatcggaggaagcccctgtgaaaccggggtgtcccgaatcaggaggaaaccgatgaacgctaccaccagcgcaactaccgccggtagccagaatgctgagcgccagtcattggcagtccaggccaaaccgataccgactagcgtcggcagcagggcaccgcccacattgtgggctgtgttccaaatcgaggtgacagtaccgcgctcattggtagagaaccagtgcaccaatacccgcccgcaaggcggccaccccatgccttgaaaccacccgttaataaacattacggtggcgaagattcccaccgaagcagttacccaaggcacgaaggctactaccaggttggtgcaggccgatagggcgagaccgatcaccaggaagtagcgagcattggaacggtcagagatcattgcggagaagaacttggataatccgtaggcaaaaagtaccgcgttagcgataatccctaccccgaccttgtcgatgccagtgtcatccatcaacaaaggggcaatcgaagcaatgttatttctaatcaggtaaaagcccgcatagccgataaaaattcccatgaacacttgtaggcgcagacgtcgaaaaacgtgctcgactttttctttcggtactttaggccctggccccggtgcttttagccaagaaaagccttttgacgatgccattttccactcccttgtgttctaggcgattacaagtcgcttcattggaaacttacgaagtctattgttccagttaattggtaaaagcgagccgtattcgaggtaactaaagataacaaagttgttaccgacaaataagtgttagctccctagattttccaagaaatcgccgctacccggcgtttcgccgcgcgcgggcagccgctagttcatcgggaactcttagctgttccttagctgactccaccggcagttctgccagggtgccttcgatttctcgccatacgcgtccgactgcaatcccgaatacgccctgtcccccttgtaccaggtcgattacctcgtcggtggaggtgcattcataaacggaggcaccatcggacattagggtgatagaagaaagggagtccacgccccgtttagagagagcatcgactgccactcgaatctgttgtagggaaacacccgtatctagcaggcgtttgacaattttcagtaccaaaatatcgcggaaggagtagaggcggtgcgaacctgaacctttagccgatcgaatggtgggttccaccagaccggtgcgtgcccaatagtcgagttgccggtaggttatccccgctgctttgcaggcaatagggccgcgatagccggtttcggtatccagatccgctaaggtatctccaaataacatgccttgcgaacgctgcgggcgcggctgcctatccatggacaactccctgacgattgatttaactactgtcttaacggtattttctttagccttgccggtcaagaaccatttacggaaagtctaaagctttacttgaggtttaattcagtttttctgcagaaacccgcaccatctgtaaaaacatttgggcagcggcttcggaaagttctcgcgtttccgataggtgtcgcgccttggccactgaggaggcgcggtagctgaccggagtggctgccctttctaccaaatctagtaaacgaagtgcagaagtttttaggaaacgcagctggcggggaggaatcccctgctctaccaaaatactggccagcttaacgatctggtggctgcgagcaggaaaacgtcccgaaagatctggggaaaccagaccggcctgcacaaaagtatctagttcttcagtggaaagtccgcttaaatctaaaagttcccgggtcgtaagcgctccatccgcagctgaagaagccaccaattgcccttcggaggccaccagccgcgcggctttttgctctggttgcacttcgcttaggctgcggccagcatctaactgcgccaagttttcccgaataacccgcaggggcataaaagaatcgcgttggctagtaaggcagtagcgcaccctctcgatatctgcggcggagtatttgcggtatcccgaggcggtgcgagcaggcgatacaatcccctgttcttctaagaaacgcagcttggagacagaaatagtgggaaactcgccctttacctgttcaactactttcccgatagaaaataccggcttagccgaaacgcccggaggccaggcttggggggtagcttctggcaccgagcgacgctgcgccgctcccgtttgcaaccttatgagtccttccgcgaagagtagtaaaccattcggtacttgccgatctggactatgtctccggtttttagttgagcagaatctacccgttcgcggttcacgtaggtgccgttaagagaaccggcatcgcgcataacataaccggtgccttcgcgaacaaagatggcgtgtttgcgggaaacggtcacgtcatctaagaaaatatcgcatttgggtttgcgccctaccgaaactttctcggcgttaagcaggaaacgggctcccagattcggtccgcgcactaccactagcagagccgatccttcgggaagctgcgcaatcgtgttgcgagcatcttccgacagggaactgttacccggcagatcatcatccctgatagcaccaataatggcggtggttaagggatctgccacgtcgttttcgctcatggagtcctcctcttactagcttcctgtatcgctcattccggcgagcgtttcaatgttagcgcaaaaaaagtttaggctcaccggtttatcacatcctggtaacgaaatttttggggcaaaaaacagtctaggcgctgccgctggtatagtttgcgccatgaaccaagccgtatctcatatcgtcctgacactttcttgccctgatcgaccgggcattgtctatgaggtcactaaagtaattgtcgaagaagatggcaatatcgttgactcccaacaatttgacgatccggaaactgaccgtttctttatgcgagtggaaattcacacttcccgccctctggcggaggtgcgtaccgcttttactcccctagcggagcgatatgggatgcagtggagcatcaatgaggtgggtaagaaggttcgcactatcattatggtttccaaggaggggcattgcctgactgacctgctatatcgccgccgtaacctgaatttgcctttagaggtggtggcggtgattggtaaccacccggatttggcgccgctagcgcagttctatgacgtgcctttcctgtgtattccggtcagcaaagaaaccaaagccaaggcagaagcggaactattagagctggtagaggcggaaaacgtggaactaatcgtcttggcgcgctatatgcagattctttccgataaggtttgccagcgcctgcacggaaaagtgatcaatattcaccactccttcttaccttcttttaagggagcgcgtccttaccaccaggcacatcagcgcggggtgaaactaatcggggccactgcccatttcgtaacgcctgacctagatgaaggtccgattatcgcccaagaggtgattccggtttcgcaccgcgactccacagcctccatgatgcaaaagggtcaagatgtggaacggcgggtattagcgcaggcagtcacctggtattcccagcgtcgcgtcctcctcaacggtaaccgcaccgtggtttttgaatagggagcgctcggggtaagtagacggtcagctgctccgtcagctcctctcaaaagcatcctacttttgacacttcggacaccaatagctgcgtctgccggccactatccggtctcgcactatcgccccgcaacgccgacaaggctccccagaccgctggtaaacccaaaaacgcccttgggagggatcatcggtagtgcagatcaagccttctttgaggccgcggcgcatttgggaacgcaaatcttcccacagtgcctgtaggcgctttaccgaaactttcgcggcctgacgattggggttgattccgcagcggaataggcattcggcgcgatagatgttgccgggaccagcgataaaggattgatccattaccacttccccgatccggcgagtagttttccgggcgcgggcaataaaatcctgagcagcgcaagaatccaccaagggatcgggccccaggcgggcaagaatcttctctactcccgctttatcgagcagttcgcactggttagggccagacagatcggctactgcccgggaaaactctagacgcagccgcacgttctctcctggcgctattggctggaactgtcccgaaaagtgtttataggtgtcacccggatgttctcctggcatccgaggggcgcctatatgcccgggcaggactattcccggtcccgcctggaacttccacgaaccataaagccctaaatgcacgtgcaaagtcgccggctgggggatattaaaatctagaaacagatgttttccccaggcccaggggcgagtaattgtcgtgctatctagggcggcggcgccctcagcaaatcgtccctggggcgaggaggcacgcgcagtgcccagtttcgataactcggcaaaagcaatggctaaacggtgaatagaatgtccctctggcataaggcaattgttgcctagggcgctacgtttgccaaactgctgggaatatttaggcttaaagcatgagtgaaaattccctggggcaggccccgcgtattcaagatgacctttaccgccatatcaacggtgcctggctagatagctatgaaatcccggctgaccgggcggttgatggggctttccgcgacttggtagaggactcgctggctcactgtcgtcgtctttgtgaggacgcggctgctggcagcctggagcgcccgcaagatggcgaaaccagtgctgagcgttgggattttgatgccagccggattgggcaactttttcaggcctacctggatcaggacgcgttggaggcgcagggaactaccccgatcgctcccctaattcagaaagttaattcctgccagaatcgggatgagctagctaaggtgcttggggagttggaacgcgaaggcatcgattctccggttgctttcctggtgagtatcgatgccgaaaatcccgaacgctatatcggtcagttctatcaggcgggcttgggattgcccgatgaatcttattatcgtcaggatgaacaccgcgaaattcgggaaaaataccgggagtttttggcgcaaatggcgttggaaagcgggattgcccctgcaggcagcgaaaccgagtttgcgcagcaagtgtttgattttgaaaccgcacttgccaggcaccactgggatgcggtgcgtagccgtgacgcgcaagcaaccaataaccccactactttcgagcagtttatcggcgacaataagggatttaactattctgcatgggcagaaggcttgggagtcaagcttgaggctggagtcgatccaattaacgtctatatgccttcctatcaggaaggatttgcccagctgtgggcagacagtgatttagataccttaaagcgatatctgcagatgaaagtggttttggcgttcgccccttacctggatccgcagctgcaagaactacgtttttctttttacggaactaccctgtcggggacaccgcaacgtccggagctgtggaaacgcgcggtaggaaccgtggaatcggtattggacgaggcactcgggcgcgcctatgtggcttatcatttcccgcctgaacatcgcgcagcgatggaaaaactggtggacgcacttttagctgcctataaagatgcgattagcaacctggactggatgggggaagaaacccgggagcgcgccctcgaaaagctttctaagttcacccataaaatcgggtatccgcgccgctggcgagacgactcgggcctgcgtttttcgcccgacgccaccctggtagatatgattcgggcttccagtgcttttgaaactgacttccagctggcccggatcttaaaaccggtggatagagaagaatggcatatgagcccgcaaacggtgaacgcctactattccccgctcacgaacgaaatcgtgtttccggccgcgatcttgcagcccccattttttgatcctgaggcttcccatgccgctaactttgggggtatcggcgcggtgattggtcacgaaatcgggcatggtttcgatgaccagggatcccactatgacggtgacggaaaacttactgagtggtggaccgaggctgaccgggaagaattcactaaacgcactgcgtctttgattgcccaatacgatgtttaccgccccagcgaactgccgggtgaggacgtacacgttaacggcgccctcactattggggaaaatattggagacttgggcggtctagcgatcgcttataaagcttggagcaaaacccacccggaggaggccgagctggcgaaagagtttttcttttcttgggcgcgggtgtggcgcaccgcgatccgccccgaagcggctcgccaacgcctggtgattgacccccactcccccgccgaattccgctgtaacggggtggttcgtaacctggatgctttccacgatactttccaaaccacgacctcagatcagctctggatggagccaggcgagcgggtgaaaatctgggaataggaacacttcaaagtaagcattaggataggtctaaaaacaggagaggttatgccgggtactaatctgacaaagattgaggcagaagaacgcaagaacgttattgggaaagttgcttacaccatcgaggtggagttatcggaaagcggagatacttttccttcccgcacggtgattgattttaaagctaaagccggtgccagcacttttgtggatttaatcgctccggaagtgctttctattaagctaaacggccaggacctgggtactgattgttaccgggacagccggattgagcttagcaacctagcggcaaataaccgcctggaagtggtcgctaactgcgcctatatgcacaccggcgagggcgcgcatcgttttactgaccccgccgatggcctcacctatgtttacacccagtttgaggttccggatgcacggagggtgtttgcctgttttgaacagcccgacctgaaagccacctaccaattctcggtgacggtaccggaaagttggacggtgctatccaatatggatactccctccccgcaggctttgaagatggagcgggcaggagattcccagcggcaccgttttgatttcccggaaactcccctgatttcgacctatatcactgccctagtggccggcccctaccatagcgttaaatcggtgctcaccagtattgatgggcgcactattcccttgggggtttactgccggcaatcgctagccaaatacttagacgcggattttgtgcttgagcaaaccgttgcgggattccgtttttacgagtcccgctacgctcgcccctatcccttcactaagtatgaccagatttttgttcccgaatacaacgcgggagcgatggaaaacgcgggctgtattaccttccgcgacgaatacattttccgcactaagccctctggagcgcagctagagcagctcaccaacaccattttgcatgagcttgcccatatgtggttcggggatctggtcactatgaaatggtgggatgacctgtggctaaatgagtctttcgccgagttcatgtcgtattggtgcatggcggaaggtactcgttttagtgacgcctggaccgggttcacgatgcgtaaagtttggggggtcaactgcgatcagctgcctaccacccacccgattgtggctcctatcagcgacttggcagatgtggaagttaactttgacggtattacctattccaagggcgcgtgtgtgctgcggcaattggtggcctatgtgggtgaaggtaacttcttagccgctttgcgcagctattttgctagccacgaatattccaatgcgactttggcggatttcctaggggaacttgagaacgccagtggacgcagcttgaagcagtggagccaggtttggctgctggaagcggggattacccaactggaatcccggattgatcgggataaggacgggcaagtcaccagcttccagattgtgcagtctttgccgcaggaaggcaccagtttgcgtccgcacgctaccaccgtaggcgcctatgattttgatgctaacgggaaactggtgttggcgcgccgggcgagcgtagatgttcaaggagaggtcacgacagttcccggtctggtaggtaccaagcatgacgtttatgtgcttaatgaccaggatttggcttatgcaaagattcgtttcgatgctgattcttgggaagttatccggactcgggttggtgatttcgcggattcgttgccacgcgcggtgattatgtgcgctgcctgggatatggtgcgtgacggcgatttgagtgcttcgaaatatctagagatggctttgggtgcgctcaaacacgaaactaattcttcggtgttgaacggaattctgcggcatatccaaggggcgctcgcctactatgctgccgagcccgatagtgcgcatcgcctgctggcaccagcgcttttcgccttggcgcagaaagcagaaccggcctcggatcgtcagcgtcagttagtacgggcattcttgcatatagccggggcaaaagaagcctcggaaatcaaaggttggtatgaggaaggcaaagttctcgaaggcgtcagcgtagataccgatctgcgttgggatatggtcttcgccttggccgctaatggcctggccaacgcagatacgatccgtaaaatggcggaaagtgacgacactattaccggccgggagaacgctttcttggcgcgcgcgacggtgccgggtcgcgaaaataaagcgcagtgggcgcagcgagtgctggacgacactaccctcaccaatgggcagatcgatgccctgactgccggaatcgcgcgttcgctttggctacagcccgccgatgccgccgatattatcgagccctattttgcagcgctcaacgatatttggtctacccgcactatgcatatggcagaatccctggtgggcgggctttaccccttagccgtgcaaagccgagaaggcttcgacctggtagagcggacggagcgttggctggcagagaacccggatgccgataaggcgctacgccgcctggtactagaagaactagatggggcgcggcgctctaagcgggctcgcaccggtaagtaacagtaccgcctttgccatttccactagccaagtaactacttttctctaccccgagggcgagggtaacagctcttttggggtagcaaagtaactaaatgctgggcggatagctaggggcgggaacttactttgctgccgccttccctaacgaaagtcccgggatttggtggggaccggcaggtttaacggctcgattttatctgccagcagggctagagcaccgtctttagcttgcagcactccccgcacgattagggcattttgactgagggcgaggcggcggtaacgctgccagcaaccaacctggcagatcacgttgactagcccggtttcgtcctctaaagataaaaacactacgcctttggcggtgtgggggcgttggcggtgcgtaactagccccgcgcaccggatacgtttgccggctaacgctggatgcagatgcttggcagggagaattccgcggcgggtaagctctggtcgcagcagttttgtggggtatccccacaggctgattcccagggcagagctgtcccattttacttgttccccggtacttaaaggcgcaaacttaggcgtcgcctcggcgagggcgagtccggggagctctggctgatagaagcggttttgcgaggcagatagtaggggcgcgcgccacagtccttcgcggcgggtgatccccagggaagatagcgcaccggagccggctagcagttctagcgccgaagtgggcaggcggacgcgggaagtaaagtcctccagggttttaaaggaaccggtggtgcgggcggataggatgctttctatccatgccggacgcatacctcggatctccgctagccccaggtttagggaggtcagtccctccccgggaatggaatctttctgggaggtattcacgtctgggcgtaagatttttattccgtggcggcgggcatcagagattaacgattgcggggaataaaatcccatcggttggttagcgaggatcgcggcgtaaaaaaccgcgggataataggcttttagccaggcggaggcatagaccaggtaggcgaaggaaaaagcgtgggattccgggaaaccgaattcggcgaagccggacatttgtgcccagattttttcttgtaccggcggcgggatctggttcttttccatgccccgaaaaaactcggcgcgcaagtcggccaggtgttcccccgggtttttgcgtcccatcgctcggcgcaggttatctgattgggaaccgttaaacccggcggcatctttagctatccgcattagttgttcttgaaaaagtggcacccccaaggtgcgttccagggcgggttttaatagcggatgcaggtaggtgactttttcgcgcccggagcggcgcgccagataaggattgactgcttgcccttgaataggtcccggacgaatcaaagccacctcgactaccaggtcatagaaacattttggtttcaggcgcggcaaggtagacatttgggcgcgggactcgacttggaatactccaaccgtatcggctgcctgtaatagctggtagacgcgcaggtcttccggaggtaagttatgcaggcgccacggctttccggaaggcgatttttccccccgcgcctgcaaagtttcaaaagcagtacgcagtgcccccatcatccccagggaaagtaaatcgattttcactaacccggcttcggagcagctgtctttgtcccattgcaccacggttcgccccggcatatttgcccagttaatcgcggccacttcggtaagcggcttatcggaaagcaccatcccgccacagtggatccccaggtggcgtgggagtttttgcaaccgccccgctatatttcgcacgttttccggtaaagccttccggtctaaccgcgcccatttcgcggcggttttggcatcgtatccgagggcgcgggaggcgtcttttagcgcggctcgcgggcgatagctaatcacattagccacttgagcagcattttcccgtccatatttgttatagacgtgctgaagtactttttcgcgttgattagattcaatatccaggtcaatatcgggcagatctttgcggtctggagttaggaaacggtcgaatagcatctgatggcgcaccgcatctaccgcggtgattcccaggcagtaacagaccgccgagttggcagcggagccgcgtccttgcacatagataccggaggaaaaacagtagtcaactatttctttcacgattaggaagtacccggagaatcctttttggaaaatcactttcaattcttgccgaattgtgtctgccgctttttccggcactggatccccgtagcggctgcgcgccccctgccaggaaagctgctctaggtaggagtcggcgctatagccgggcggcacccgggctaaaggtagatgcggcaccggggtagaaaaatcaaagatcaggtcttttccgattgcggccgcattttcgagggcgtggggaatctgccgatagatgtggcgcagttgctccggagtccgcaacatggcgtgggaggcgggaaggaagtcttgaactttatctaggggcaggcggtggcgggtggcggtcataacatctgccaggtgctgactggcggggtcggcgcagcgggcagcactggtggccactagcggcagcttagttttgcgcgccaagtgatctagttgcgccgctagacgctcttccctatcgaaaccggctaaggcggcctctaccgcaatgttttctgccccaaacatctcttttagctgttctaagaagcgagctgccgccgcgattccggagcggtaaagtacgcgccgcagcggcccggcgcgggtgccggttaatattagccactgcccttttgcccaggaggctagtacgtctaggttttgtcggtctgcttcccgctttccggcagctagatgatgagcgctaattgccccagttaaagcagaatatccctggtcggagcggcagataactggcagatgggtttcgtcctctaaagtaaattcgcaccccggcaagaaagcgaggccggcttgccgggcagcggcgcgcgcctccatcaacccgtaaactccgtcataatcgagtaacgctagaccagatagccccagttttttcgcaccctgcaccatttcgcgcggcgaacacgcccccactgcgaaggaatatgccgaatgagcgtgcaactcgatatagccgctcatttttgcccctcccaggcatctaaccaccaagaggatttgcggtacaccagcagtaagatttcttgctcgccgtaaacccgcaggaaaatccggggccctaggtgattggggactccgggacgccaccactgtccgtttataggccagggcccttcggttttctgcaccgctattttccgtccggctacctgcacccatttgaccggggcttttagctgtccgtctttcccaggcaagatttgccggccgcgactatcgataattcccgccggtttagggtgcatgaaaactatttccggcgctaccccacttagcgccccaactctaggacggggtcgcttttgtctcccccgctcttgccaaggtttcagttcaatcactgaacgcggatcatatccactggttaaatgaggtacccgcaccccgtgtttacctaataagctgctggcactgcgggctgcctgatctagttcctggggaggatccgcgtttcgtccccaaagcggcgtcatcgcctggcgggcatctactgtcttcaaaggatgcagctctatctgggagactgcccccagggcttcgctgccgctgcctccaaccgtaaccgcctctaactggtgttttatcctctctactaggtctttgctgctaacttccacccccaggttccagctgcggctaagcactttcccgttttcgcagcggcaaataaactgcacctgggtgcacaccagcccgctcgcgcgcaggcgggcatacatttccaccactaacgcccgggcaggcagcaacagttgggtaagggagctggcgggcggggtgaagaattggtagagaccgggtgaggcgggcgcggttttcaccctggcagcgtcctccagattttccccgctcgctaagtcgtagccaatcgctcccagagtgccaaaacgccggatcagcgccgggcgtcccagggcgcacagttgccccaagctggtgattcccaggtggattaggctgtccgtcatttttgttaggtactggtcggagaaatcaaatccgcttatttttatccccggacgcaagaaaaaccccaggctacttaagggctctgcgccaagaaaaggcattaccccagggtcggcaatcagcagctgttcgcgggcagctagacacgccgccaaagtaccccgagcaatcccaatctgcaccgcgtaccctacctgcgctaactgttcagttagttctgcggccagggcagattctgcgtggcgctgactgcgacttaaagcggcggtcaccagccccggaaaccagctcttgggggaatagagttgctgggctgcggcctctacgaccggttgaaacgccagttccatatctgccagtgagtagggtttttctttgagggagggacagaggacgcgcgcttgctttagccgcatctgcggccttattccggctgcgcgcgccggagccgtgactgcctgcactcgcccgccactacacagcgccactgcttcatctagggggagtttggcggcttgggctggccactcggggatatagagggctagtaatctatcgttcatcgcgccctcctcgccttaatcgggatagctgagagaaagcgaaacagcagaggcaaacttaataactccggtagcggggtcgcagagcgcagagtatccatcaggcactcacctttatagtggttgttgccccagggaaacttgtcgagtgccgggcgctagcttctagggagatagcgcctgcccaggcagacgcggacaagattacgcaaccggagcggcgcgcttttgcggttagaatccgttgttgctgcggaccgtaatctaccattccgatagccaggactgccgcgcagggtacgaaaagttgggcgcatgccagggcgctgccgccggtatagggaatggtgattacccgtcttaaatccagcccgatttgccaggcgcgctgccagcctagatctggaaaatctaggaatactgcccagccgctctcccccattttttcggcggccatctctagcagctgcgccccgcccgctactttttgataagcgctggccagtggctttgggctgcgggagcgcatcgccaaaacctggcgcgccttttccaggcgctgcaactgagccaacttatcgaacatacgttcgattatagggagcctcccccgatttgtcacccctttttccgggggtgcttttagcgcggaaaacccgcctttaagagatacagataagcagttcagactctaaaagagatctgcgtgacttccggttgcaaccaaggacagcaccagtacgtcgtgttgcttatagtaaatcagcaaccagtctggttcgatatgacactctcgatgtttcacccagttaccagttagcgcatggtctcgacacttttccggtaaaggagtatcgctcgccagaaggtcaacgatcctctctagttttccaaggtcttttccccgctttttagcagctttcagttgtttgcgaaactgcgaggagtatttgatgacatagcgcgccattagtcgtcctcgctaagagcggcagcaaatgcttcacgggcgcttgcgtagccgggaacgcgagggtctttggcaatctgttccgcctctaacatggcggcaatcgtctccctattggggttgcctagttgaatctggaaaggaatggcacgctcgcggatagcttgccgcacgaaaacgttaaacgcggtagaaatattcattcccatctcgctaaacagctgatccgcctctttcttcaaggccgcatccatacgaatactgatatttgttgtagccataaaagacctccttttacgtgcatagtatgctatacgcacgaataaatcaatacttttcacgacagaaatagtatttagaaattaaagatagacccggtagcgtcttcgccacaacgactgcacgtaaaatcccagggcagccgtaaccacgggcattttctggggatacttttaacgcagaaaatctacctttgagggcgtgcgggaggctcgaaatctgcccgcttggcgcgggttttataccgcttagttcagattacttgtactgccagcaatgaggctcttaactgtaagtagcaactacgcacgcactatcgttttgcggattatcgccggtaagtgcgagaggaaaggagtcggaacggaatgaaattcacgctcacgattgatcccaccgtaaccgaaactatcgtgacggtaacggcgcgggaggttgatgctgaggtgcaagcgattcaaaggcttgcttccggtagcctaagtggcgccctctcccccgcactcgagcacccgcttcgccgtctcatcgggacaggtgccaatgacgccacggtgttggaagtgcgctcgatactcgcgttctttactaaaaagaaagcggtgtatgcccataccagtaagggtgattggcgaattaaagcccgcatgtatgaactcgaagaatctctacctgcagacgattttgtacgtatttcgcaatcggagattgtaaatattgccgcgatcaagaaacttgatctttctttctcgggaacgatcagtgtgcagctaaaagatggctctcgctattacgtttcccgccggcaacttccagcttttaaatccaaactgggaatctaacccctgcagaaaacctctaaatcacacgaaggataaaaacccatggaaactaaaaaaatagttggtctcaccctggtaggggcttgcattgggatcactatcggcaccagtattgaacttattttttcttctctttcctcctctagctattacccgggagttccagaattcttaaacagttttggaaacgaaaacgtggcagtactaattgagaggctagtttatgcactctacggcataataagtaactttgcggggttgctttaccgtaacgaaactcgcccgctcttcctcaatactgccctacatttcgggatcatccttatctgtgggatcgcagctggcagctaccttaaatggtggggctctagcttcgatatgctcggcgtaatcatcgcaatagcgcttatctacctgctgatttggctgtttaattggctagttgcccgcgctgaagtaaaaaagatgaaccaaaaattgcaataaagcctcgccccaggattcccgtttactcatatgggtaaacgggaaaatccaaagcagagaatatggtgtaaggccttgctagaccgggcggctaggcatggccacagtcagcgcacttatcggtctacacgggataggagctgtgatctatttgttggaaccgttcggcaactttttcgaggtagtcgcggtgtttcaacttggctaaccattcagcagggattgttttttctgtaggcggcacccacaactgtccggcttagacaggcataggcggcgctatcccctccgaaactgacgacggtttcgatggcttcgcggaaagtagtggcgtgatagcaactgcgatgtatccgtcgtaccctacttcgataaacgcactaaagcgagtcattgtttgtttaccaatgtaacgtctatcaccagcgcccaatggactttcaccccccccgtaagcggttcctgtggggttagcagtagcccgagtagtggccggggaatttgcttgatacactcgttatggatatctcatcataatcaggaggaataatgaaggattggttgcgtaccacggctgcttttgcaggcgtggcggccctgacactgggaagcgctgttaccgctacagcagcaaatagcgtagatgaaggtagtaacgttaagagtttcaatgttacttggagcgacaaggtcaagcggtacgaccaagcacttgagggcaccaaaattgacgtgcttctatactgcggggtttacgaattcaaaaatggcgagccaaccggcgatccgcttggatacgagtggccaaggctccagctcactgttggcaaaaatcaaaaaattccccttgatatcaaactcaacaaccccaagtacaagggtgttgacaagataggcgttgacgactgctaccagtatcgcgacgggaagtggggacctagccagttctcttttggaactggctatcatgctggcgtcaaaagtctcgccatgaaccagcaggccaacaccgatttcaagtttgaattggttaaaggcgagtgggatggggaaacctatctaggtgagattcccgagggcaaggcgcccacaatcactgtcggagtgtcgcaaggcaaggttacagaaaatggcgaaaaagtttacgagccccttataaccaaggccggcgacccggcggcaaacaagtatgtcttcgccgacggggcttctcatacgccttctgccgaagtcaatccgaagaaccgtcaagacacccctattactcgtgcttcaattggtaatagcctggacatgttctctggctacacgggtcgttacaggtggtaccagttgaccgcttctattgacgattctgaacaagctaagctcttccgcgttgaaagcgttgaaggtaatgactctaaaggctggacggtgaaggtaagctcagctatccgcacgatgactcccaaggcccccactctagtagaggcaaataagtgcggcgttgagggtacggttcagcttcccgagtccaagtactttgactacgaaaccgttaccgagggaaccaaagtttcggtagctgccctagttaagcaggcttacaaggacaagatcgaagttaagggcgacaccaagtgggagttcaatgttgctcccaagccgtgtacactaggtccagctgaacagttggcaactcctgctgctcctaagctgatcaatccttccgctgatgatccttcttcttgcaccgttaaaccttacgtgacgatcaagcagaccgagggcgtttcctacaccgttactgcaaacggcgttgagctgaaggctaacaaggatggcaagtacctctacccgtacaactcgaaggtagaagttaaggcctccgcattggacggttacttcctggctgaagacgctgtaactaagtggacctgggacagccacgataccgcgatgaacccagcatgcaagccggctcaaccggagaataagcaagtttctcagcctatgaagaagcttgcttcaagtggtgctgaggtcgcttccctactcggcatctccgctctactactcctcgcaggcggtgcgctaaccgcacgcaggttcaagtaaccaactagcaacatgcatttcgcctcccggctaattccgggaggcgaaatgttttgatacgaccttacgctcctcatccgaagtttaactagcaccgtagcaatcgcgttataagctcaaatacctcttgtgggctgaaagttagctaatgacgtccagcaaatccggcgtggatcctagttaccgtcgcactgaggatgcgatttattttttgcaagccgctcaacgcttgtccttgtagaacctggtcaaaactatccaagggtgtggaaacgatcaaagaatgcttccagtttttctataacccgctttttgcgttcaatccgactatcagcgccggtagcgaacaaggagccttgcggcagaatcttgaagatatctactcgaatccatgtcgtggattctaaaatactcgcctgcagtcaagtcataaatacattttggctgttttatcagcagctaccacgtagatattttttccgcgggacgtaaacatcattactttatttctggttttagaactgtgcttcgcattgtgcacatctagagtttattgactttcctatgcgttgcaacggttaaaaattgaaggaaaaatttcgataagagctatttacttgaaaacggtgcccatcttttcgacgttgcaaaaaaccagcaatagtatccacatcattggggcgcattcctagctctcggcatttatctcttacttgctcaaccgacacagagagccaacgctcaggcctattcatcatgtctgccttaagtttgtgttcttcattccatttaagcccactggaatagccctgcgcccatcgagcaacattttcaagaatttttcctatgtcgtagggcagaggttcatctggggattcttctggctcaacgggcttatacggaataacttgatcgtggagaagtaggatgggtctattagcttcgatccactctttagactcttgaggactccattcaattacagctaaagcgtcagcttcaagaccccacaggtcattaagacgtttccggtcaggccaagcgaaaagaattctgcctgcaagtgcacgcgtggataagccacgccaggttaggtgagttactccgcgtcttgacagcaaagcttttataacgtcactgcttacatctttttttggtgtaactaccgttattggacctccgggttgttgaagcaaccattctattgcccgcgcattctgtggttctcgagatgtttcaacattctctcccaacttagagatagcaacaggcatggagttactgacttgccccattgttcccgacctttctttcgtactacctatcagtaatgttacctgtagactctgacaattctccttaaaaaacctgagtctccttacgctaggttttcctatgttgtacttttatggtttgccctggggatgaggttgcaatgtctgactgggttacatagcggaacgaccgccgcgtacacgaggctctcgactaccacacaccagaagagataaaagcagactgcaggaactctcgagaatcgtcagagaatataggcaagtagacacacctaggaagaaaacccagtacacttcaatgagaaccgaagatctgcacatataaaaggcacccataacttattttgactacggagcaccccatgacagacacgatcaacaaagtccccgagaccacaccagacttcacaaccgaagcagcgaacaaactgtccgagctattccctgaagttgtggcggacgggaaagtcgacatcgaaaagctcaaaaccatcctcggagtcgacgttgatgatgctcgcgaacggttcggcctgacatggccaggcaaggcaaacgctattagagcggcacaaacaccaacgacggcaacactcatgcccgacaaagaggggtctgtcaactgggattccacccagaacgtgttcatcgagggcgacaacctcgaagtgctgaaaattctacagaaacattattacgggcaaataaagatgatctacattgacccgccatataacaccggaaaagattttgtataccgcgataactatgccgactcgattggtgcgtacctcgaaataacaggacaaactgatgatagtgggaaactatccacaaactccgaatcagctgggcgattccactcaaactggctcaatatgatgtatccacggttaagattagcgcgcaatctgcttgacgaagatggaatcatctttatatcgattgatgacaatgaagtcgctaacctgcgacttatccttgatgaggtatttggtgaagcaaatttcattgaaaactacatttgggaaagcaatttcagacccgacaatagttctcgggtagaacgagaaaatgctcagcatattctctgttatgcccgcagaaaaccatctatacccggtttggtcggtgttcaaaaggctacggagggacttccatcattgaccaagaattcaatgaaggcgtctactctgaagttctcgccagattgggtggagttccgttttcccgacggattatacagtcctggcgagcgatctactgggtacacgcttgaggatgaagtcgaagtgcgtgatgggtgcgcaatgaaagactttcggctaacaggacgcatgatttggtcgcaagaatatctggaacagcaggttctcgcgggtaccaaaattgtaatcaaaagcgaaggttttgttccgtactctaagaaaatagccacatctaacttagcgccgacgaccctgattcccagggatgtggttggagatgtgcttgctgggaatgcagaaatccgcaacatttttggtagccctgtgttcaatcatccgaagccaactagcttactgcgctatctgattaattcggtaacggaaaaccgtaacaaagacgcgataattttagactttttcgctggttcgggatcgacagcgcatgccgtcagttccctaaatgcagcggatggaggtacccgccggagcatctccgtacagctccctgaaccaacaccggacaactctgtagcccgtaacgaagggtacaagacgatttctgagctcgctcgccagcgcatccgcctggcaggagaaaatatcctcaaggatgaggcggaaaagctagagtatagagcagaaacgcttgatgttggattccgtgcttataagcttgcagatacaaatttcacgaagtggaaagctgactcaggtttgtctcaatcagaacttgtcgacctttttgcggacatggctgagtctgcagaggatacggctgatcttgaggcgctactcaccgaggtactccttaaactgggattctcgcttacagagaagatcgagactcttgaggtggcaggtctgtccgtgtttagcgtcgctgatggcctagtgattgcttatctggatgaacatattcagccgaccctggatcagttacgtgcgcttgttagtcaggagccggagcgtttggtgatcttggaggatgcctttcagagcaatgacgagttgaaaacgaatctggtgcaagagtgccgtactcataatgttgacctgtggacggcgtaggagggcgagcgttcgatgaaattccagtttgatccacgacagccctatcaaaccagtgctatcgctgccgtcactgacctatttgatgggcaaccagccgatgccgaccagctcctgaccggcttgcagtactttcccccccagcagtcactggacctgcgggactttggtggccagggagctctcgacgtcttcgaggagaccggtgcatatggtaacaacctcctcctggacgaggacacgatcttggaaaatctgcagcgcgtgcaagataggaatggtcttgagatcaacgagagcctggtcgatggtttgcagttcgacatcgagatggaaaccggcaccggcaagacctacgtgtatctgcgtaccgcgttcgagctggcgacgaagtacaagttcaacaagtacatcatcctggtaccgtcggtggcgatccgggagggcgtgaagaccagcatcgagcttatgagtgaacattttagccacctgtacccgcagatcaacatggactacaacgtttactccggtgaccgtgctgaggacgtgcggaattttgcaagggccacgtctttgcagttcttggtgatgacgattgactcgattaggggcgataagaacacccgcatcattcaccagcagcgcgataacctctctggcttacgcccgctggatttcttgcaggccacacgcccggtcgtgattatggatgagccgcagaacatggagtcgttgctggctcagtcggctgtgactgatctgaaccctatgtgtacgttgcggtactcggccacgcaccgcacgacccgtaacatggtctaccggcttgatccgctcgatgctcaccgactcgagctggtgaagaaaattgtggtctccgatgctcaggagcttggtagtgcggctaaaccttatgtcaagctgctcgaggtcaagcgggatccaagttttaaggccagcttggagttgaactgccgtaagagggatggctcttatgccaagcgcaaggtcagcgcctctcagggtgatgacttggagagactctccggtgggaacccggactatgaaggcaattggcggatcaacgagatcagtgtgatgcccgaacagatcgagttgaccaactacggctacctgcgcgtgggggaagaaatcggcggtaaccaagacgctgtcttccaggcgatgattcgcgaaaccgtgcgtgagcacatccgcaaagaagaacaattacactcccaaggaatcaaggtattgtcgctgttctttatcgacaaggtcgcctcctacctcggtgaaggaattaacaatcttgacgctaacggtaagtttgctacctggttcgacactatctatcaggaagaacgggataaaatttctacctcccacgcattcttgccgacaaatccagttgaggcacgttctgggtatttcgcacagatgaaacgcggcaggggcaaggctgcgcaagtgacgttcaaggactcctcgggcaagaccaaggctgacgatgacgcctatgagttgatcatgaaggacaaggcccgcttactgagtatggatgagccggcgcggttcatcttctcccactccgcgctacgggaaggctgggataaccccaacgtgttccagatctgcaccctgcgagacatgtccaccgagactgaacgccgccagaccatcgggcgcgggctgcgcctgccggtcaaccaagctggcgagcgcgtcaaagacaccggaaccgcacagttgacggtggtggcgaacgagtcatatgcggcgttcgcttccgcgttgcaagacgagtacaagcgcgctggtgtttcgatcgggtttgtgcgtaagaccgagtttgctgaactgcccgtggttgagggcggtaaggaatcccggctggggacgcgtcgttcgacagagatctgggaggttttgcgcaagcgcggctacatcaatgatgcaggcgaggtccaaggcacgtgggttcctgaccagcttggtttcaccgtcggtttgtcggagcagtacgcggactatgaggctgaggttattgatctagttgaccggtgcaagatcgaagcactcgtcaagcccaagcgcaagcggagagtccggacactgaacaagcaggtgtatgccacaccggagttcgaggagttttgggagaagatcacttctcgcacgacctaccgggtgagtcttgaccgtacggatttggtacagcggtgcgtggcccggatcaaggaagccccgcgtattgatccgatccgtatccaggtcacccgcacgggtgtggagctgacccggggtggcgcgaagggctcggtgcttgggtttcgtgacgaggtgctcaaagagtcctacccgctgccagacatcgtgctacagctgcaagagtccacgtcgctgacccgtaaaacgatcatcgacattctgctcggatcgcagcgggttggtgagttcctggccaacccgaatgactacatcaagatggtcaccgggtgcatcgaaaccgagctcgcccacactctcatcgacgggatccagtatgagcccatcggtggcagtatctacgaactgcgggaactgcaagcggacggcctcgaagagaaagatcgtttcattgatcaactttacaaggtaagcaataaggaaaaaacggacttcgactatgtagtctttgactctgcggtggagaaacagttcgcccagtatttggacggacgtgaagacatcaagctgttcatgaagcttcccgacaagttccgcatccccaccccggtcggagattacaacccggactgggcgatcatcaagctcgaggacggcgtggatcgactctatttggtgcgtgagacaaagtccaaccaggatccgatgaaacgtcgtccgagcgagaatgcaaagattaccgctgcgataaaacacttcgaggctatcggcgtgaactatgctgtcagttctcctgatcgttgggaaatataggagatgaatgcgtgtttcaaaacttaaacgcctaccaggccaagttctatgcccacgagcttgatcgctcctatgcctctgaccatgtcgggcggttagcgggtctgctatttgatgcccaggtagaacccaaacctcaccaggtagacgcggctctgttcgcattgcagacccccttcacaaaaggggtaattctagcggacgaggtaggtttaggtaagacgatcgaggccggtattgttatcagccagtactgggcgcaacgtcaacgccgcatcctcattatcgcgccttcatcgctgcgtcagcagtggcaacaagagctgagcgaaaaatttgcgctacctgccacattgatggacagaacgaacattgatgaactcgtcagtcctggtgggtgtgatgaaatcctgatttgctcgtatgagttcgcaaactctcaaactcaaaggctcattcgtccctgggatttggtggtatgcgatgaggcacatcgattacgctctaattggaccggacaggcaaaaatcgcagggaacgttgcccgcatctgtcaggccgcaggtaaaacagtgatgctgaccgcaacgccgctgcaaaaccgcctggaggagctttacggccttgtcagcgtgttctctcccgactacttccacaccttggactcctttagggagcggtacctcaaccacccagaaggccccgggaatgatgatctcgtggatcgtgtttcatggattgctaaacgtacactgcggaaggacgcggataagtacattcgcttcactcaacgaataccgctcacggtggcatttacgcccagccctgcagagattcaactttatgatcggataaacgagtacttgcagcgtccgttcttacacgcgttcgctaagtcccaacgccacctatcgtcactgatcctgcgtaaacgacttggctcctcatccttcgcggttgccacgacgttagagaagatcgcgaaccgcctcgaaatagaaatgacagctgggcgtaggcgtaacgatgcgggcaatctcatggacgacccagatttaaccgatgagatacgagaagccagcgaagccaataccgacaccagtcccgcgcaaataaacttcaccgaccggcaggagatgctcgacgaggtcaacgaattacgcggattcgccgcgttggcgcggtcgatcacggtcaatcagaaggccgtgaaactcgtcgaagccctcgatcaaggctttgataaactgcgggaaatcggtgcgcccgagaaggcgatcatcttcaccgactcgaccgtcacccaggactacctcgcccggtcgctgggcgaagcaggatggggtgaaggactgatcctgttcaacggcagtaacgacagccccgaagccaaacgcatctacaaccagtggctagaggaaaacaaggacggtgaccttgttaccggtattgctgctgctgataggcgtaaagctctggtggatgaattccgtgaccggggtcgaataatgatcgccaccgaggctgccgctgagggtatcaacctgcaattttgttccatgctggtcaactacgatctgccctggaacccgcagcgtatcgaacagcgtattggacgtgtgcaccgcttcgggcagaagcacaacgtcatcgtcgtaaacttctccaacaaggggaaccgagccgaagaacgtattctagagttgctcaccgaaaagttccaactatttacatcggtgttcggtgcgtctgatgaggtgctgggtcagattgaggacggactggactttgagaagatgatcgctggtatcttggacaactgcaagaccgccgctgagatcgatgctgcttttaaggaactcgaagagcggtattcaaagcagattaaccgtgagatgaaaaaaacgcgagctaaggtgttcgacaaccttgacccgaaagtgcgtgacaaactcaagtattacgatgcccagaccggggtagttctcaacgcattccagcgactactaattcaggtaacgcatcacgagctggaagggaaggcaaccttcaatagttcgggaacccagtttaccctccatgaagccccactcgtaggcatccccattggggactactactttaagtcagaaccgcgcaagggtgcacaccagtatcggtataccagcgacctgtgtgcgtgggtaatcgagcatgcgaaaaaccacgacactccaccggcccacctcacgtttcagatcaaaggctccgaacgcgccacgacggtcgctaagcggctcaagaagaagtccgggcggttgcggatcgaggaagctaccttcaccatgaaggcaggcaaacaacaactgcgcgagtcctacctgctgaccgcaggatttttcgatgacggcaccccgatggatcatgagcagatacgagaccttctcgacctgaactgcaccgccatcatcgcccagccagtcgacagcaccgggttcgaggatgacctcaatgctcagcttgctgagctcgggcaggatgtggaggatcgcaacgctgggttcttcctccagcaagaagaactcattgaagcagcacgcctcgaccacaaagcgaagtttgacgcaaaaatccgcgaataccaagccaaagagaccactgcgaagaaggccgcccgcaaggccgccagcgccaccgaagagctcaagctcaagcaagaagccagacagtggcgacgcaagatcgacgacaccgaagatgaataccgcaccgaacgcaaccggctccgcaacgagtccgaggaatatctcgacaacgcccgcgacgccctcaacgccaccgagaaccgccgcgaactgttcaccatcacctgggaggtaaactgacgatatgtgtcgttgagaaagatgcgactgattgctagaccatacgtctcacacataaagctctgcgacaactcacgcgccgcaatgctcgctgcgatcgaggtctacaacaaaccccagacaacatatcgagaacagctagtcaccgtcctggtcgtcaacgcctgggaactgaccctcaagactgcgctccgtaaggccaagaaaaatatcttctacaagaagaagcacggagaggactacaggtccttatcactggagcagcgtatcgcagacatggacacaacctactgttagaaagaatcgcttcgaaacgctcctcatccgaagtttaactagcaccctcacaaccgcgttataagctcagatacctcttgtgggctggatgttagctactaacgtatagcgagtctggcgcttatccgagttagtgccgcacggaggctgcgatttatttgttgcaagcgtctcaacgcttctccaggattatcaatccattcttaagaatgctctaaaccaggaatctgaggaaagtaaattaggtttattccattgcgcgattaacgggtgcttgctacccgagaacatggactgaacgataactagcgaaaatggcactgcctgaaactgctacctcagtgggctcaaacctaaggctttgaaatcccaaccacctacgctgccgcgctaaccattcgcaagccgccatatcgaccggtgtaaatcagcgcatactctgatgcgccaatagaagcccctaggtaaagaagtaggtaatagctaccgaggctgacatccgtcaagacctccgccgggcgcccaagaataaaacagcgcctgtaagttagcagcaaccgccaggcgtcctcatccagtttcaaagtttccgtatccaaggtgtaaaccgcgaaaagcaatagctatatgcgcattacgcatatagtacgcacataaccattgatttttgatgccaatatttctagtatttatgtaagaacaggagggacaacgatggctaaagttagtaccaacattaatttggacgccgatctcaagcgctccgcgcagcttttgcttaaagacctgggcatggatctaactactgcggtcaccatattcttgcggcaaaccgtgcgagatcaggcaatcccgttccaaatatcgcgcgacattcccaatgcccagaccctggctgccttgcaggaatacgaggaaatgaaggcgcaccccgaaaagtacccgcgttataccagcttcgaagaagcaatgaaagacgtttttgcatgaggctaaacattgttctttccaaccgcttcaggaaggatttgaaacttgcgaaaaaacgcggtttggatctggatctactgaactcggttatcaaacgtctcgcccaaaggaaacctcttgcccctaaacaccgagatcacgaccttggaggcaatttcaagggatttcgggaatgccatataaaaccagattggctcttaatctatcggatagacggcgaggacctcatattgtttttaaaccgaactggctcacacgcagatctcttcggtatgtaagagccgaaccggcaacttctgtttgagattgactgaagcccctgcggcgattccgtttgcggcagcgccctatagacgattcaccactgcaacaataccgaacacggcaccagctccctataaaaagcaaggatgcttctccggcaggcaatcaccgacacactatcgttttattttttgctgcgggtctttttattcttttcccgattcccgattatcacaaaacaagcaaagcctaaagcccagatcggaagggtgaacaacatgtttctaagatagttagcagtaaacatcaaaaagaagtccaaaatagccgaaatcgccaccaggataatccccgcccaaatcaaaaaatcatcgatagtgtttttgcgcttagacatggtctttagtttaccgggtttcgcgtatgccctcggaaacagtattgagtgtctataatcgaatagcggggctgcacgccgtctacaccgggagtcaaaaccgggtaaacctggcgggcacgcacaggggccattcctgccgggatgaccacagtagagggtgacagcgacacagaacagcgacgcatagcagcggagcagatcagcgacgacggcaagtaataaaaggtagaaagagggactgcatgaaatcgctttccgagatggtggtaaacaatatttttgccaaccagggggttctctccccgtcctccgaaaccgttgccgccgttaggaaagtagtgaattgcatcgtggaatccactccccaccccaaaagcttctgggaaaccgactactggaaaaatttcctcctcggcgaagatgattcattctggacgcaaaaatccggagaatctttccaagaagtattcacaaaagtagacagtatccgcagttaccaggtttatcctccagctaaatggacacgtaagaaccatgacaatatacacctggttagatcagagaaccgttatctattttttcgtgaaggtaagcggctgtacctccgcgacaatgtggttttgatccctgcaggtattacccctatcgggattgagctaggcattgactcggaagggcgctacgtcacctgggagggacgtcctctcgccgggaacttaaaaaaacctgcagatactgttttagacctgtttccctacccagacggaatactggtttttcccaccactgacggatttcgtgccgcccaccaagacgaggacgaagttactgacagttttctcgataacgtgacgggactgaatccaaattccttagaatatttttcctgccgcccagccctgactcctcaccctaacggatacgaggccaccctgtcttactgggacgatcgtttcgatttgtcagaggaaaaggatcatcgtccggtactggttttagcccgtaccaaatccggggattcctactatgccgttgtcgctcctcgcaataatccctactttaaagaccgctgcaaatggcagaaagtttcgggtggtaacaccttcgtagtcgaaggtcagttcaaaggtcaaccggtgcggataacagaaaaagttaacggtgatttagagatcagctatggagggagagtaaaatccctaggcaacggacacttaagcgaagtaaagagaattgccaataacgacttcctccaaacgcttcgggtcgttatttacgattaccagggcgagatccgaacccagattttggaaatcactttgagcagcgacggcgctatttcaaaaaaactcctcccttgcccgggcaatgaacttaaaccaggcggattaggccaagcaggcaaccccaaaaaacgcgataaaaaagctgcttcgccgctagcaaaagagaaggctaaaacaattgctgatcgccttactaactggccactcatgggcaagcaactgttacaccccattttcggagcagcctccctagccgataaggatatccccaccgtggcaaagatctgggatcgctggagtcagtttcaagatgagaccatcgaaaaaaaggcaaacctgtttatggggctcctgccactgaacggaaacgatctagctcgcacaactatgctggtagaggaaggcagaactaaatataaatcctatagaataaccgagggatccaccctaggtgaaaagctgactatcgatgccttggattcgtgggacctacctatcgcgatggcgcaagaaaaatatctaaaccggttacaagatcatttttcaaccggacttaaaggcatcagcggcgtgcagttcatctgggtaacccgaagtgaccccgaaaatgctcgctattattcaagggactacgccaaaagttgggtagtggacaccaatcagaacctctggatgctgcgctacctggacactccagaacttaaagctaaaaatataaagtttttaaacgtccttgcacaaaccctgctaatggaagacgacaaccactgccgctacttccttgatctaggaaccggggatttttcccctctcccgcctaatcgtaaatggctagccggaggaatctactgcgagaacggagtctacgtaaccccgaaaggcgatccctacctgttatccggggaaactattgcggtacctaaaggtctaaagttctgcccctccttcagcgatgagctgcatattgtgcctgatgccagcggaaaaatgctgttgctaaaagacgacctcagtgccagctgccttgacctgacaatcgatattgactccgccacggattttactccggttgccagagtcgtaaccagtaataaacgcccagatagacccgatagattagtagatactgtccccaaagagatgcattgggtctatgtgcgagatcgctcgggaaaaatccggttttataactattcctcttccaagttggtagcaggtaaagttttcaaggatgaatcgagtactgcctcgctggtagccgtcaaaccctacaagaattttaccgtggaatactctcgcactaaaggagtattggccaggtttgacactaagaaaagagcgttagtattagttcctcggcactgccaactaataaaaatggtagtcacctccaaaatcctggaggttacctatcaaaaaaatgacgggaaagcctacgatacctccatatcccacaagcagggcagctgttcctatcagcgtaaggaagagcctcacaatattttcatggataaagagtataactgggaaatagattctcattggactccgcgaataaaccaactaactatggatgatatttcgctcggtcgcgatgaagcgttttaccagggttttcatcgtttaatcctggcttctctaaacgctgaagaccgcgaaaacttcttagattttctaaaagaattgcgcgccaccgagagtcctgaagcccgctcatggtacagatctaattgggcagaggcacaagccctaaccgcagataatcaacccagcctgtggggtcactattaccgctcgtggacacagttctacggttgtctttacctcgctaactttgatttagaagctgccctggaagcaatacggaaaacgttacagcggcaggaaagtatcgaagacgaatatggcataccaaaattatttattgataccgcgagaacaactttttggggaatacctgatgttcccgaaagatggatctaaattgcgaccgatcgaaaagaaggaaacccagtaagaaatatgcaacccagagcattaactgaagagcagcggatgcaatatatggatgctctctactcttgcatcagctatagcaatgccccctatttagcgccactattggtgcggttaaaacctttaagcgtacccgggttgggtactttagcttccgatgcccagtggcatgtgtttattgatttcgattttctggagtctgaaaacatcggcatggaagatttgggccgtctggtgcaacatgaagcctggcacgcggcctatagacacaatgagctctccgatctctatgacccgcactatgacccgggactggtcactatcgccatggatcttgttgtcaaccagcatattccccatattgaggaagggtggacggggaaaaccgcagtacttcccgggaaaggcgacttctctgaccttcctgaggatttaacctggcgaaaatacttaaagaagatcggcgagtggcatcccctcgtaccactatcaggcgacaaaaaagaagaggaagaagaggaagaaagcaaaaagggaaagaaaaaagacaaggaaaagaaaccgggttcaccgcaggaagaaaacccggataaaggagacgattctgatcaggatagcgatgcggattcctcaaaaaaggacagtgatcaggatagcgatggggattcttcaaaaaaggacggcgatcaggataaagaccagtccaattctaaagagaaaactgaagaagatgcatccggtgaaggggaagatcagggcgacgatcaagaaggcgactcgccctccgaggatcattccgggacaggaaagggcaaagatcaagagggggaggattccgaaaccgatcaggcctccccgcgtaagggcaaaagccataaaaagaatagtgacggcaagggtgaaagtgcctccgcaggaaaaggaactagcagctccaaaccccaaaaacgccccaacgaccagcccagtgaaggcggaaatggtggcagcgggtccagtggcaaccaaccgataacttgcggcagatccaaactgacaaaagagcttattgaggctgctcaagaactagatcccggttttgaagaaggatcgatggaacaagtaatcgccattcgagaaatggcggaacagattacaaaatttgctgagagcaactatcgctggggacaatcccaccgagaactgatcggatgggcagaagctcagttagcaccctcgatagttccttggaaaagacgcttgtcacgggtattgggcaccaagattggcaattctcgccctcgtttcgattacacctggagaaaacccagtaggagacaaagctgcggagtgggaaagccctattatccagcctttaagggtgacacaaaatttgagcccaatatcgtgatcgggattgacgtttccggatcgatgtctcgcgggaacaccatcgaccacgtggccggagaaattgacggtattttgcgttcgcacacgattaggagtgcctacgccttttttgttgacgtgcaacccggagaactaaacgcagtagataataccgctaaggtgattcaatccgggaagacttcgctagttagtttctcgcgcgtcaaaaacattacacagtatttgttttcgggtggaggcaccgatatgcgcaaagccttaaaggcggcctccgaacttcgcggtaagctgcgccccaatatttttatattgattaccgactgcgaaaccccctggttgcaagaagaacccgcgggcttgaaacgagcagaaaccattcttctagcggttaacaccaatatttcctcgattacctcctcgcagcaggtttgccaacaattcaatattcccgaatggcttagtaaagctgttattccgatacccgcagaatcataaaacccgattagaaatccaaatacccccaaagaaatagataaaagaaagagttgttttagtatgaccaccaataaaaagatgctttccgctcactccagcgctctcgctgaaaaaattgctatcacctgcacggctgggaacgttcctattatttggggggatcccgggatcgggaaaaccgcaatggtcgagcagcttgcaaaagaggtaggcagggaactgttcgtggtgattggctccactatggaacctaccgatattgcagggctaccgataccgcaagagggcgaggacggggttttggaaagccgcttcaccgatcctgacttcttggcgttcgtacgcaaacataaaggtaacgtgattctactgtttgacgagttcttgtccactcccccggtggtacaaaactcgctattgactgctatccagtctcggcgcctccctggagggcgtttcctaccagataacgtgtggatgattctggcctctaatcccatggaacaaacccttgacggcaccgagttgtccctgccgatgtcgaatcgcctagtccacttttatgcaaatgttgatcaggagtttttcttacgtaacttcccgagcaacttcgggaaagggtttaaaaatccagctgaggcagatatccgggcgattatcgctggtttcttaactcgcaacactgcaatgattcatgacatgcccgaggtggactccggatttgtgggcggatggtgctcaccgcgctcttgggataacctagcgcgtcaagttgccatgtacgaggacggattcagaaccccgggaatcaagatggacttcgtggccacagtcggcgagggcccctatatcgcgttctccagttacttcctgaaccacaagctgccggcgccctcggaaatcatcgctgacccagagcgttccgttgcctggggcaaactgaccccagaccagatttacgcgattatggcgggagtatctagttttactcctgataaaccggagaatctcgggaaaaccctgttagcaattagtgacgtgtatgtggcggcttctaagagactgagcccgcaagggatagctgtttgctgcggactcctagaatccctcttcatgaagacccggatcaaaagggatctcaccgatggtatcggagacgttttggagaaagctgaaatccatgaacaagtgctgcaaaaacttatgggaaccccgttccttgactatctaaaggagaaaaagctcgcgtaaagggaagtacggagttaggtagtaaatactaacgaatgaattctcctttttcccaaagttgacgtctataatcagcgttttcttgttgggaaatgatgccagctttttccaaaagttccaggattttcttggtcccgaaggcagctgttacctctggctgcttcctggcaagggcaagcgcgcgtccatcatcacttataaatagattatgttcattgcgcgcaaaactaccgacaataattgctatggtctccgcttctcccagattctcattgtgatcgcaatgcccgggggtatccaaaacattcttatatgcttgagcttgaagcagctcagccgaattaggccattgaaccttagtccagaattttttcacctctagatataaatcatcgcgtttcttttttttacaacagaggtgtttaatttcgtcctttactgtgggtgtcacgtagaggttttgcttaaaaagtttttttaccttaggaagcagacctaccagggctaggttgaatagggtgcaggtatcgtggaaaagtaatgtagacacgatgtcacagctccagaagtttcaagatctcgtcagccgagagatctttgtcggattcttcgggaacttcttccaccaggttgtccgtaatttgaataccgagagtccatttgtaggtatcgacgggtacgtttcccttaattacctgttcatagagattattcaacaattcggttgggaatctttgcgcgcccgacaaactggcgcggcgctgcaagtcagcccacgttagtccaatctcttcgagatgttcacctaaaaagttttgggtataaaccgtttttccatcctgataaagaaactctggaaccggcaacttaaagtcttctaggcgagtactcaaggccggaactgatatcccccaatcccagatgaatctggcaaatttgaccggttcgactttgccctctaccagactgtgaatttgcgcctccggcatcaacaagtctgcagcaaagagattagccccatcttcctgctcttttatctcatcatcattcttaatcatggtgccctgtgctatatgaccaagttcgtgggcgatcccaaaaacttgcctaaaccagttgtctgttcggggagccacaatcaccgggcgagaacctagacatagacaggagccattagccttcaagccgatctgcaccacgtcaacatccagacgatcttgaacttgactggagaagtcaatatcgatttttccccccagcatctccaagacttctgccggggttttcccttctatagtgctcatcgataagcctgcttataaactaagccgatagaacgaaaaacgtccaggtcatccaggttctgccggtattctccggtttccggatcccgatcgtgccgggcggcaacgtcactgggtacccaaaacttgtcatcgccagtaattaaccaatctagcgaaatatctaagatggttgcgatttcagcaatctcgccggcgctaaccttgcgttgatcgttaatcactcggctaagttgcgactcatcccaacccattttttccgccagcgtcttttggctgactttcttggctttgcaactttggcgaatccttcgcccaatggtagtttccatttttgacacctccatttgattaactccagcataaacaaatatttgcacaattggaagctgaacttgcgaaaatcacaattttactcaaaacttttttcgcgagtagaccatttttgctggtaggagggtttgcatggatttaccttgcggagaaacgcctgttttttctttcagcgtcctacttattttggtaggtgacctctaaagtggcgcgcgccaaggaatgaaacagggcctggaagttagcagccgccgccgaggcgtcctcatccagttccaaagtttccgtatccagggcgtgaaccgcaaaaatatagcggtggggccgatcccccttcggcggagctgcccccatataggaccagccgcccccatcgttgcgcaaatggaaggccgggccttcaagctctaagtcactgctgcccgcaccggtgggcaaggaagtcatctccgccgagatgtcggtaatcaaccagtgccagaatccggaaggcgtaggggcatcggggtcaaaacaagtcagcaggaaagacttggtttctttggggaaaccgctccacgaaagttgcggagatagattcttccccgccgctatctgcgcggtgggcatctgaccccccgcagtcaaatccgtagaagtcaaagtgaaagttggaagttctggcagcgcctcgtaagggtccagagccagcgggcgagagttaagatccatgattcctccaaaaacgtgggagtcttaccgtttccagattacttgaacagggagaatatagctgaagaatcacggagctagatttctgcaagacagctagtacctcgcattaacccgcagcggtttcacaaatagttacctccacgtgttccgaggatagctagcgagattattcgcccctcggaaaaggctctagaatcgaggacgtgttgcatttgatctatttcgagccgcgcatcccgggaaacaccggagccgctatccgcttatccgcctgcaccggtaccctgttacacctggtagaaccgctttgtttcgatatggatgacactaagctaaagcgtgcgggtctggactaccacgacctcgcgcacgtaaaagttcaccctaacttggaggacgccctcgccgagattcccgggaaaatccatgcttttaccggtcacgctaagctgcactttcaagacgcctcttatggctcggacgacgggctgctatttggccccgaacctaccgggctacccgaagaagtcatggcgcatcctcgggtagcggacttggtgcggattccgatggtgccgcatctgcgttccctaaacctgacgatttctgcctccatcggcctctatgaagccctgaggcaaaactcttaccccgatctggtttagttgccgctggcgccgcgcagcggagaagaaaccagcagccagataaccgttaacaccgtgagaatcgcgggaaaatacaggtattcttgaccccagctaaacagcagttgcgcccgctccagattaggagaagaaaacaccaacgcaaacagcaccaacagcaaggcttcgatcccgctgagcgcccaggcaagcagccgcatccgccgcccattatgaatcaccgcgatcgaaagcacgatccagtgcgccacattcgccagcgataacattgccagcccgtatccggcagaaccagcggccggcagggtagaaaactcgtgaaacagagcaaccaccgagaacaccactaaacctgccatgaagatacgccctaccccccaagagggtgtgcgcggatccctatgggaggtatgcgctgatgtagatgctggcacgttcttctccgaatttcgcggtaatatctttcagattgtacccgcccaagctgaaagcaccacttcacttccttaccgcaaacttgaaaagcgttttgtattctcgttcacacttcttccctatcttgagaaagagcgtaattcgccgtgcgtttagcgagcaaagatgaaacaatgtgtgcaggtgtctggaacgccgcggtcgcggacaatcttcctttaggaggtcattcccgcccatgcgctaaccggacatggccgtgattttattcaaggagaacatcacaatgacaagtacctatgacgttgtagtcttgggcgcgggcagcggtggatacgctactgctttgcgcgccgcccaactggggatgaaagtcgccctcatcgaaggggacaaagtgggcggcacctgcctccatcgtggctgcatccccaccaaggcgatgctgcacgtggcagaaacagttgatgccattaaagaagcctctcgcctgggagttaatgccagttttgacggcgttgacatgcaggaggtgggtcgtttccgcgacaagaccatttcccgcctccacaagggactacaaggtctggtcaaatcccgcaagattgactatatccaaggctggggtcgcgtcgtcagcaaagacaccgtccaggtaggctcggaaacttaccaaggcaagaacctggtattggctaccggctcttattctaaatctctacccggcctcgatatcgaggggcgggtaatcacctccgaccaggcattgcaactcgattgggtaccaaacaaggcagtggtacttggcggcggggttatcggaatcgaattcgccagcctctgggcctccttgggcagcgaagtcaccgtgatcgagggactaccccatttagctaataacgaggacgcctccgtttctaaggggctagagcgggcattccgcagccgcggtatcgccttcaagaccggcaccatgttcgattcagttacccaaaccggtaactcagtgcaggttaagacccagtccggcgacactttcgatgctgacgtattgctggtggcagtagggcgcggcccgcgcaccaaagatatgggatttgaagaaatcggggtgaacattgatcgcggctttatcccagtagatgaacatttaatgaccaatgttcccggcgtatatgcagttggcgacattgttcccggcctgcaacttgcgcatcgcggtttcgcccaaggtatcttcctcgccgaatatctaggcggcctggatccccagccgctggtagaacccaatattccccgggttactttctgcgaacccgagatcgcttcggttggtttaactcaggcgcaggcggaagaaaagttcggtaaggacggggtaaaagtcaccgaatacaacctggctggtaacggcaaatctcagattctgggtaccggcggcctcatcaaattggtggcacaaaaagatggtccgattgtgggcttccatgccctgggcaaacgagttggcgaactggttggcgaaggccagttgatggtcaactgggaggccttccccgaagatgtggcagcgctggttcacacccaccccactcaagacgaagcagttggcgaggccgcgatggcgcttgccggcaaacccctacattcctaaagtccagaaaggtagattaagaacatggcacaagatattgagatgcccgctctgggcgaatcggtaaccgaaggtacggtttcgcgttggctaaagaaggtcggcgatcaggtagcggtggacgagcctttactggaggtatccaccgataaagttgactccgaggttccttcccccatcgcgggggtaatcaccgagattttggtggaagaggacgaaactgtggacgtaggcacggtgctttgtcgggtaggtgaagccggcgaagccggatctgcagctcctgccgcaccggcagctgaagaaactcccgctccgcccacggttccgccagttccggaaactccggcagccccggaaactccggcagcccctgctgctagcgaagccccggcagggggcggacaagacgtggaaatgcccgctctgggcgaatcggtaaccgaaggtaccgtttctcgctggctaaagaaagttggcgacaaagtagaggtagacgagccgctactggaagtatctactgacaaagttgattctgaagtaccgtcccccatctccggtgtcctcaccgaaattttggtgcaagaggatgaaaccgtggatgtaggcaccgtgctttgccgggtaggtgaaggtgccgcggctcctgccgccactagcaccccggcagccccggcagctccggcagctccggctgcccccaaggctccggcagctcccccagctcccagccttccggaaaatccggaagaacttccaggtgcaggtatcccctcctcgattaaacgtgagggtgaccatcacgtagtgcagtgggcatacccgcaggcacacaccggttatcccggaactatgaccgtggaaggacaggtagtaccgccctccgagaatgctccggccgcgcctaagccgccggctgctcccccggcaccgaaagttccggcagctccggccgcgcctaaacctccggtagcgccgcctgctcccgcacccgcagctcccaaggctccggcagctccgacaccggcagcggctccgagcccgaagcccgcggaaaaaccgcaggcagcggcgcaggtaagtggcggatatgtgactccgatcgtgcgcaagctggcgcgggaaaaggccgtggatatctcgaccctcaaaggcactggcgtaggtggaaggattcggcgtgaggacgtgctggcggctgcgcagaaagcgcagaccccagagcctactaccccggcagctcccgcggctccgctacctccggtcaaaccggctcaggaacggggcaagaccgagaaactttcccggatgcgccagaccattgccaagcacatgatgaactcgctagcctccaccgcccagctaaccacggtggtagaggtagacgttacccggatcgcaaacctgcgggcgcgggcgaaagactctttcgcacagcgggaaggcaccaagttgtcgttcttacccttcttcgtgaaagcggcagtagaagccctcaaggcgcacccgaagatcaactcgcgggtaaatgacgaaaccaacgaggtcacctactttgatcacgagaacgtggggatcgcggtggactcggagaagggtctgatggttccggtaatcaagaactgtggcgacctgacaatcgcggctattgcccgcaagatcaacgagttggccgcaaaggttcgcgacggttccatcagtatcgatgaaatgtctggcggtaccttctcgattaccaacaccggttcgcgcggcgccctattcgatactccggtagttaactacccagaggaagcgatcttagggctgggcaccatcgtgcgccggccgatggtagtcaaagacgccgaaggtaacgacaccatcgcggtgcgttccttggtgtacctggcgctgtcctatgaccaccgtctaatcgacggtgctgacgcagctcgatacctcactacggtaaagaagcgcctggaagaaggggacttctccgccgaggtcggactgtaaaggtctctagctagctaaaaacttaatagtcctgataatgttctttggctccggcatttgccggagccaaagaacatttttatacccgttattattcccaggggcggaaatacaaacagctagcggtagctaaagggcaaaacagcttccctaaaatagccaaagaaacggcggcagccaggaaaaagctagattccaaagacgtccaagggacgcttagtgatctgttggaaaattaggcgtgcctgattgttttggtaacgagtccaaatccaggactgcaccgcgtccgaatcgaaataaatcacctgggcggcatgcgggccgagttcgcgcacctctacctcggagggcgagggcggatcttctgctagcagcgccgcagtttcggtgcgagaaatcggaactcctagttccccaatcgacataaaatcagggtgcatcatttgtcgaatctgcacccggtccgcagtcgcacaaaacttttgaaaacgcagatcctcatccctaaccacctgggtaatcggacgcagattagcggccgctccccgcgcggctgaccctagtcctccgactcccgcagggccagagctacggccacggtcaagaggaactaccggatcttctcgccgatgattctgagggaacttagccacgttatcggggattgaatcaggaacctctttcaactgggtggcgctggttaacggtttttttgaactccgctctcgtagctgcgccacccgcgcttcactaagccccgggccttggttcacctgcccattatctctaaaggaataggcggcctcccgagcatatatatgcgcctgtaaagccagttcctgctgggaagagtccacacattgcacctgtagcgaacgccccgccaaatagcgatcaatattacgaatcagagacagatccgtgaccggcattccatcaagtttacgccaatcattgcgtcgccactggtgacgccaggtttggagcacagctgccacatactcggaggaagtgtaaatagttagcggctcgcgcaattggtgggaacgacgcacgaaagaaaaaatcgcccagaactgagcctgtgaaatcgacatggaatcttccacgtgtccacacgcccaattatcctggtcaagcacccatgaccaacccaccaggttggcatctgctagggaataggcgtcgaccactaccgttaaagtcacataaatatcttgtcacatttgcttgctgattgctcacgcttgccttgagaaccttgtcacctgcgtttacgatcttcccgaatgcgaggtgccagcagctgccgtgcctgccccgccaaaactaccgaaccgaaaatcacgattcccaccgcgtccgcggggagctcgccctcctcggttaaagaaaccgcccggtcaaccgcgtctaaaagattcggagccgcgaaggtttgttccgccccaaagacttctcccgcgattttcgccagttccactggctccatggcgcgctcgccatccatcggcaaagtcaccaccgcatctagcagcggctccatctccgccaagataccttccacgtttttatcgcccatcgccgagaaaacaccgacaaccttttggaacccgaacgcgtcctcgattccggctctaagcgccgccgcccccgccgggttatgggccgcgtccacgatgatggtgggcgaaccccccagaacctctaggcgcccgggagaacgcgccgcgtctagcccggccgccagcacttcctcagaaagcggtttgcctgctcctagcgcttcgaccgctgcaatcgccaaagccgcatttacggcttggtggcgtccaaagagcggcaaataaaggtcttgatagctggcagcgggggtagtcagggtaaacatttgtcccccgaccgccattttgtggtcactaaccgtgaaatcctctccgaaaaggcgcaaagtcgcatctttttcccggcaggcctgtctaataacctccagggcttctgcttcttgcggaccgcaaataaccgtggcaccaggaagaataatccccgctttttctccagcgatttcgctgagggtatcccccaaccatttttcgtggtcaaaagaaatcgggcagattacctgcaccggggagtccagcacattagtggaatcccagcgtccccccatccccacttcgattactcccatgtctataggggcagccgcgaaagcctggaaagctaaagcagttaaatactcgaagaaggaaagatagccttcaccggctgattcgccctctttatcggcgagggcgataatcggctccacatcctggttggcctgcaagaacgcctggggactgatcggtttcccgtcaatagagatcctctcgcgtacgctgaccagatgcggggaggtaaagcgccctacccgcatcccctgggcgctcagcaaactatcggcaatgcgcgcagtagaggttttcccattggtgccggcaatatgcaaactgggataagacagttgcggatccgaaaggtagtccagggcgcgctcgatccgcgctttagtcggcgagatgttatgttccgggcgcctctgtaagatccgagcatagacctgggcgacttcaaaatctgcctgtagggcttcatcggaggaaaccgcggcagctgctgtttcattaaaggaagcctccgcggcctcttgccccgcttcgccctccgcgatactttcgtcatcagcaagctcatcgggcatagcaatcccgccagcccgcagaatctctcgtaagcgctgcgattcctgggggtcagccgaagcatcgctaatcggcaactcgatttgttcttccctatctgcctccactaaataaggcagcagttccggatctatttgtccccgttttccttgcgcgccctgggctatctgttcgtacggattacccgccggctgttggctatcttgactattcactaatccccctttgcgtccggcatattacctataccggatgcaccgcagtgatgttgattttcacctcatctgcggtcgccgcttctaccctaaacgcggtagccagtacttcccgggcgatcatttgggcatgctcttgcacgccggctactcgctcgctaggaacttccagcaccagttcaatgcgatcagaaacgtgcaaatcctgggctttacgctcatcttggatggagcgcaccaagtcgcgggcatagccttcggcctcaagctccggggtgatttcggtatcgagtaccaccactgtcccatcgcccagaaccgtggccacctgtccttcttcaacttcaaccgtggtagacagcgagaactggtccccgcttaaagtaactggctggtcggcaaccaacacttcggggaagacaacgttttcgccctcttcgtgccactgaccggtcttttgagccttaaatagctgggaagtaactttgcgaatctcaggtgcgaaggctttcggattcaacttcagttgccgctgcagcttaagccctgactcgctagaagcctgcaacactacctgcttgacgtttacttccccggcaatcaattccgagaaatccgccagtttttgggcgtcatcatgcacaatagtcagtgacttcagcggctgacgtacccgcaggccgtgggtcttacgcagcgaatgagccgccgaaactacctcgcgcaccatatccatagcggataccaaagcagggtcatcaaccgtatctggaagcaccgggtaatcgcagagatgtaccgactctcccccggttagtccccgccagatttcttcggtcactagcggagccagcggcgccatcacccgcatcaatacttctaggcaagtgtagagcgtgtcgtaggcttcggtatcttcttcccagaaacgatcccgggaagtacgcacataccagttagtcatcaaatccagatgctcgctgatcgcatcgcaagcccccggaatatcgtagctatccagcagctccttgacatttagcgctaagttacgggtacgtgccaataggtagcgatccataactcccagttgctgcagcgctttcggatcctctaaatccaaggctttcgcctggtaaccggcacctttattgcaggaaccggcatagagggcgaagaagtaataaatgttccatagcggcaaaatcacgtggcgaaccgtatcccgaatcccctcgtcctttaccaccaggttgccgccccgcaccaccggggaagacattaggaaccaacgcatcgcatccgaaccgtaggtgtcgaacacttcgtttacgtccggatagttgcgcagcgacttcgacattttgcggccatcatcgccgagcacaatcccgtgagaaacacaggaagtaaaggccggccgatcaaaaagcgccgtagccaacacgtgcagcacgtagaaccagccgcgggtctgcccaatatattccacgataaaatcgccgggatagtgatcctcgaaccattgctggttttcaaaggggtagtgtacctgcgcatagggcatggaaccggaatcgaaccagcagtccaacacgtcagggatccggcgcatcatggatttgccggtgggatcatccgggttaggacgcaccaaagtatcgataaacggccggtgcagatctttaacttctaccccgaaatctgcttctagttccgccagcgaaccgtaaacatctacgcgcggataggtagggtcatcagacttccacaccgggatggggctaccccagaaacggttacgggaaatcgaccagtcgcgggcgccctccagccatttaccgaactgtccatctttaatatgctcgggtacccagtcgatctgctggtttagctccaccatccgttcacggaagtcagtcacttttacaaaccaagaagaaaccggtttataaatcaacggcttgcggcaacgccaacagtgcggataggagtgtacaaaggactgttgccgcaccagcactgcccgtttttctttcggggtgcgcgccaaggggccttggtcgtcctcgttaccgagccggaagtcgcgaataatctgtttattggcgtcaaaaatctgtacgccctggtagtcggagacctccgcggtgaatagcccggcgtcatctaccggggtgacggcgttaatcccattggcggttagcaggatcatatcgtcctcgccgtagggagcctggtgcaccagaccggtaccgtcagtggtggttacgaagtccgcagccagtacgtgataggccttagcgcccggggtttccccctcgcccagctggtctttgtagtagtcaaaaatcggctcgtaggagcgtcctaccagctccgatcccgggtattctgccacaatctggggatcttcccctagttctttcgcgtaggcaggcaacaggtcacgcgcgataataactttttccccggctaccggagattctaaatctgcttctacctgcacggtcacataggtgatctcggggccgactgcgattgccaggttagagggcagcgtccagggggtggtggtccataccatcgccagttcgcctgtttccaggcgtagccccacggttacggtattgtcttgacgatcctgataaatatcgtcatccattttcagttcatggttcgacagcggagtctggtcgttccagcaatagggcaacaccctaaagccctcataggccagtcccttatcgtaaagctgtttaaacgcccagatcaccgattccatataagtgacgtcgagggtcttgtagtcgttatcgaaatctacccagcgtgcctggcgggtaacgtattcttcccactctttggtgtagcgcagcactgattcccggcaggtctggttgaatttttcaatcccgataccgtccgggccttcaatttcggatttgtcttcaatattgaggatgcgttcggcctctagttctgcgggcagaccgtgggtgtcccaaccaaaacgccgttccacccggtggccttgcatggtttggtagcggccgaccacgtcttttacatagccggtcagcaaatgcccatagtggggcaggccgttagcaaaaggagggccatcgtagaacacgaactcgttagcgcccgcatctccggcatctctttgggcaatcgatttgcggaaagtgtcgttctgcttccaatacttcagggtctgttcctctagctgggggaaagacggattggcggaaacatcgccatctttatgccgcggatagtagcccacgttaaacctcacctatttcgagccgttactgccagtgccgggacgaaggcttttcagcctcgcggtaccaccccgcttcacccaaaacttgggcctcattaactgctgttacgggcttacccgtctggttctactgcctgttatcagggttcttccagaggctcctcggtgatagccggatctacgccacttcccaacagcatagccggtttaactttttctggaaattttgtccgcgctaagataaacacagttggcataaatcactttcttttggaggacgcatggtcaagttaggggttatcggggttggttctatgggaggcgcgattgtgcgcggcctccttgcttccggccaaatgcaggcggaagagattttggctttcaaccgtacccgggagcgaatgcacgccctcgaggaggagttttctctgccggtagcccccgatgctgccaccgtagcccggcaatctcagtacctgctgctgggagtaaaaccctatatgattgcgcctctgctcgatgaactgggcgacgccctcgccggaaaaccagtagtgatctcggtagctgccggaaaacctttagcggatattgaagcgcatttaccagcacaaaccccggtagtgcgggtgatgccaaatgtgaatgcccaaatcaaccagtcaatgtccgggattgctgccaaccaatatgtgagtgaggaggaaatgagcgaagtgcgcgccatgtttgacgctatcgggaaaaccgcgctagtaccggaggatcatttcgctgcttttgccgcgctcgctgggtgttctccggcctggatttaccgtttcattgatgctcttgcgcaggcaggcgtggcccacggttttaagaaagacgaagccactcagatagtagcgcaggcggtagcgggttcggcgctaaacgtgctgcaaaatctgccccaggggctaaacccgcaagctttagtggatcaggtttgctccccggcaggtactacggttgctggtctgttagcgatggaagatgccggtttttcggcggctgcgcgcgcggcagttaacgccgcagtcgcccgggataatgaattatcagcttcgtaaatatgccggttttttaaggcgagctgggataggatgaaagtagttgacgttagccccatccagtggcagctagcaaggcacaaaatgtgaggtaaagatggctactcccggacacgaagacaatcaaggaatgtgtctttatatagttctttacgactacgatcccgaactactggggcgcaaaaaagagctgcgagatgagcatcgtacctttatgcatcgcctaaacagcctgggcaccgtgctttctagcgggcgcaccgccgccggagatgagcgaggatctttaaccatcatgctggcacgcgacgtggaagaagcacagcgaatcctcaaagatgacccctacgctcaagctggaatcgtaaaatccatgaccgttcgggaatggtcgccagtagtaggaacttttgccgactgttagagcagcaagctttttgaggtgctggtaaaactctcccccgctgccgcccagccctaggcaagttagaccagttaggctgcgcgcaggtatcttagttttgtgagtggaaagcagcgattacgcagtctcctagatcccttcatcatctccatcctggtgattttggtgctcgggattctattcccggtacctgcggtggttgtgaccgctttgggatatttggggaacgccctgatcgtactgttgttcttcctatatggggcacgcctgtctacaaaagaaatttgggaaggcttaaagaactggcgtctacaaggaaccgttgcgctttccacttttgtacttttcccgctgctgggaatagcgatgcacccggtagatctaaagctattggggccagttttcgccctcggaactctatacctaaccttgctgccctctaccgtccagtcctcggtaactttcacttctattgcaggcggaaacattgcgggggcagtttgctcggctactatctctaatatcgcggggattatcctcacccccgccctggtattcgcggtgatgggcagagccagtgggattgaggcttcgcgggtggtaaacgtgctgctgcaactgctattgccctttgttttagggcagctggttcaccgttttatcggcaagtggctaaatgcacaccgccgccttaccaaagctaccgataatggaactatcttggcgattgtggcctcttcggtttgcggtgccactgccggcggactctggcaacaaatctccgcccaccaagtgggattgctgctgctgcaatgcatggtggtactggccattatgcttaccctcacctggaacctaggacgctgggtatcgctagcgcggcgcgaccggattgtgctgctaatgtgcggatccaagaagtccctggccactggtttaccgatggcagcgattatttttccgcccgctaccgttgcggctgtaactatcccggtgattgtgtttcaccaattccagttacttgtctgcgcgattttggcgcgtcgcttagccgccaacccttcgtaagttggcgaaccgggcgaggaaaacgagcaaagcctaaactaaaccgcccctacgagctagaagccaggtaggggcggcattaaggtttatttgcgaggttagtcttcttcgtcctccggcacgaagtcgaccccactttctttacgctgctcgggcgtaatcggagccggagcatcggttaacggatcgtagccgcccccggacttggggaaagcaatcacgtcgcgaatcgattccgcgtgggtcatcaaggaaacaatccgatcccaaccgaaagcaatcccgccatggggaggggcaccaaacttgaaggcgttcagcaggaacccaaacttttcttgagcttctgcttccgacaaacccattaccttgaagatgcgttcttgcacgtcacggcgatggatacggatggatccacctccgatttcattaccgttaagcacaatatcgtaagcataggctagggcgttgcccgggtcttcctcgaagcggtcaagccattcgggtttaggagaggtaaacgcgtggtgtactgcggtccaagcagaggctcccagcgccacgtccccttcggctttcgcggccgccgagggcttaaacagcggggcgtccactacccacacgaacttccattcattcgggtctagcaggtcgcaacgggcaccgatttctaggcgcgctgcccccagtagggcgcgagcctcatcgatctttccggcaccaaagaaaatgcagtcccccggtttcgctccggttgcctcagctaggccctcgcgctcggtatcagtgagattcttggctaccggccccgatagggtgccgtcgtcttctacctttacgtaggccaagcctttaccgccacgcgaacgcgcccaatcttgccatttatcgaaagtgcgccgcggctgggaagcgcctccgggcatcactactgctcccacatattcggcgttggcgaacaccctaaagggggtgtctttaaagtattcagtcaggtcagttagttccagaccaaaacgcagatccggtttatcagtgccaaaacgcgccatggcatcggcgtaggtcatatgaggaatcggggtttcaatatcgacatcaatcagcttaaaaatagctttaagtacctgttcggcaacttcgataacgtcttcttgccgcacgaagctcatctctacgtccagctgcgtgaactctggctggcggtcagcgcggaagtcctcatcccgatagcagcgggcaatctggtagtagcgttccattcccgccaccatcagcagctgcttaaacagctggggcgactgcgggagcgcataccaagagccgggagcgaggcgagccggtaccaggaagtcccgcgcgccctcgggagtagaacgggtcaaagttggggtttcgatctctacgaagcccaaagaatctaaagtatcgcgagtgactttggataccttagagcgcagacgcaaacggtttgccatctcgggtcgccgcaaatccaggtagcggtatttaagacgcgcgtcctcgccaaccttcccggagtcctcggcgtgtaccgaaacttggaaaggcagcgcagcggcggggtttagtacctcaacttcatcggcgtaaacctcgatttcaccggtaggaagttccgggttttcgttgccttcagggcgaggatgcaccttgcccttaatacgcagaacatattcgctgcgcagctcatgagcaattttctcgtcatggataacgacctgcgccaccccggaggcgtcgcgcaaatcaatgaagcaaacgcctccgtgatcgcggcgacgatctagccaacccgctagttctactgtttctcccaccaggtcgcggtttagagttcccgcgtcatgcgttctgagcaatgctgttcctttcctcatgtaactgttaatagtctagcgcccccgcgaatcgctggcattttccgccggtcttggtgtcgtgtttcactggctatcatttgctaactttgctgctacctccggtaacgttaaagcgaatagtttttaagcagacaggcaaaaattaatgagcgaaatagctgcgggggcgagtgcgtcctctttggagaccaatcccgactttgaaaccggggaactagacctggagggcagcttcgatacccacgaagcagacgccactaatggagattcctttgcggaagaaaccactttcttttccgacctggggttaccggaaatcattttagatactttaaccgatatgggatttaccgagcccaccccgattcagcggcagggaattcctcccttgatggccggacgggacgtagtggggattgcccaaaccgggacgggcaagaccgccgctttcggactgcctattctgtccgcatgtgaccaaaccgggcaggttcaagccctaattctggctcccaccagggagcttgctgctcagtccgcgacagcgatcactgagttctcccgaggaatgaagctaaaagtggtggcggtttatggcggcgcctcttacggaccgcaaatttcggcgctgcgagagggtgcccaaatcgtggtcggcacccctggacggattatggatttaatggagcgcggggagctgaatttatcggcgctcaagttctttgtcttggatgaagccgatgaaatgctgcgcatgggattttccgaggacgtggaccagattgccagcggcgctaacccgaatgctatccgcgccctcttttccgccactatgcctccggcgattaaacggattgcggagcgtcacttgtccgatccggtagagatttcgatcgcgccccaatcttccacggtcgaaaccgtgaatcagacctatgcggtggtacctttcaagttcaaatccgaggctttatgccgggtactagcactcagcgaagccgcggcctcgatcgtgttcgtgcgtacccgtatcgacgccgagcaggtaggctccgaactacaaaaagccgggttcttagcggctgccatcagcggtgatgtgccgcaggcagagcgggaacggattgtagcccgcctgcgcgatggcggcctggatgtgttggtggctaccgatgtggctgcccgcggcttggatgtagaacgtatcgggctggtcgtaaattacgatgtaccgcgagaagccgaggcctatgtacaccggattggtcgtaccggcagagctggacgcgaaggaacttcgcttactttctttactccccgggaacgtcctcgtaaacgagtaatcgaaaaactcactggcgaaataatgaccgaagtgtttattccctcccctgcccaagtcgcgttggcgcgggcaaatcgaatgagtgagcgtgtccaaagccgcctagagaagggggaaatggatgtttactatgacgctatccaagacctggtggtttcccgcggaatcgatatcggggacgccgccgcagcgctgctagcgctcgccagcggtgatctaggcccggaaaaacggcaacttgatttccgcgtccggcgggaagaaaaagtcgacgaattgggacgttttatttctgccagttttgaggaaggccgcgaaggcgcctctgcgaagggtgcgcgcggcaagggcgcggctcgccgccacttttcttctacttccgctcggcgctatcgagtggaggtaggacgccgagatcgggttaaaccgggtgccatagtgggggcaatcaccggtgagggcggcctcaaaggtggcgatgtggggcatatcgatattttgcagagtttctcgctggtagagatggcgcgcccgctttccccggaaactattcgcaagattgccaaagcccgagtctcgggacgcaccttgcggatacgcgaggacgaaggctccggtaaaaagagtggcaagaagcgcgatttcaagcgcaaacaccggggctaagcgattcttttctcaggggtcagccccggttaagcgaggctgggatttaagcggttttggttgcttgcggcggtttcgggtcggcatttccagaagctaccggctaaagccttaactggttaaccggccaggctagtgcccgcagctatctgctgttcttccgcagtttccaagctaacttgaccctgcactttgacgtccttaccgaaggtataggggccgctaactttaaaagccttagcttctcgcagcgagggcaccccggccgggaaacgcgcctcgaaatcagcgatcttcttaaagtagcgggaatccaaatccacttcgacttcttggtcattgaccttaagcagatggtagttatcgcccagttcataaatgtctgaacgcactaaagtcagttcattagtagttttcaccggcaggaaacggctgcgcggcaccaatatggcggtagcgcccttaaaggatgcaatcgctgcccccatcgcggtttccatttgaataaccgctgggctttgggaatcggaggggtcaactgttttgtggtttgcgattaagggcaagcccaacaccgcgttgcgctctaccaaagtatcgcgcagtttcaccaggtcaaaccagaggttattagtgtggaagaacggatgccgatgttcatcggtaaagtaatccatctgttccggcggagtctgggcagtgtcacgcaaaatcagttgtccatcggctttgcggatagctaaatgaccacccttgcggtcattgatcgtgcggatacatagctccgcggcatagggggcgccactggccgcaaaccagcccgcgatctctgcgttcggggtggctcccaaattatctgagttagaggtcatcgcatagcgatagccggcatcgatcagtttatctaacagtccggagccataaagcgcagtgtagatgtcgccgtgtccaggcgggcaccactctaaagagggatctttttcccaagaaaccggggttaaatcatcggctcgcagtttcggttcctgattctgtaagaaatctaaaggcagtccggaaacttcaattcccgggtgattctgcaaagccgccaaagtgtctgcctgggtacggaaagaatccatgaaaatcagcggcaagctaaccccgaactctttccgtgctgccattacttgctggcaaataatatctaggaaagtgagcccggcacgcaccggcaacaaagacttggccttatccatgcccatggaagtgcccagtcccccattgagcttaatcatcacagtcttagctagagcagactgtgcctgctgggggctaacctggttatcttccaagcgatccacgctggtcagcggggaaatggtttcctcggggataaagctgctatgttcgccctctaaaacctggtagtagtgcgaaaataccgagatggctgccgcgctaaccccggcgttctccattttcttgattgcttgggctagtccggtttcgctcatcacagacctctttgttgacgttaacagctcctaaaaagactctacctgttttagccaagcctcacgggcttttagcgactcttttagttccgcagcttttttgctatccccggcagattctgcgtcagcaatctccgtcttaatctgctcaatcagcgatataagctgcccagccatcccttcggcgcgtgccttggtttcaggattagatttgcgccaaacttcttcttccaggctgcgcaggtgatcttcgaccgcccgcatccgccgttccacgcggtcaatatcgccgcgcggcacatgcccaatctcatcccacttttcttgcaggggacgcaactttgccttcagctcatctacatcggtgatttctttaagggcttccgcctttaccaagatggcttcttttttctgaagattctcagtttcgagggcgttaaccgcctcgttttgggcgttgcgggcatcaaagaacttttgctgtgcgcggtggaaacgttgccagagggcatcgtcttcgcggcgtgaagccctgcccgcggccttccaacgctgcatcaaatcacggtaagcccgggaggtttccccccaattggtggagttagaaagtgcctcggcctcgataatcagtttttctttagcggctttagcctgggattgggccacatctagctcgttaaagaatacccggcgttttttatcaaaagccgagcgagccgccgcgaaacgtttccacagttcgtcttcgattgagcgttcaatacgtggaccggcgtgttggaggcgtttccactcgtccagtaaatcacgcagttcctgcccggattgtttccactgggtgcgcgcagaatcctgctcggcgatttcctcggctctcaccactactttttcacggtttttacgcgcttcttctttggcttctgcccgctgagctgctgcctcttccttgcgtttatcggctttttcttgcagccgcgccactttttcccgcaaagcaggcagatcccctaccgctgccggctgtgctacctgctcacgtaaagatttcatagtctggtcaatctcgcgttcagcaagtttaggtagccgttcggcgaataaagatatttgagcagctaaatccaggtagcgccgcacatagatatttaacgggttctcaggtacttccgccgggaactgtccaatctgacgttcttcttctccgtccttaacccagacgcgcccctcttcatcgacgcgcccaaagggtaacgctgcagaaaagtcaggggtttttatgggcactaccggtttattttccctgggcagatgaatcttccccggggtcggtacgggcctgggcttcggagcggtatcgggctgttcagtcactaatttttccttaaatcagttattttcacggctaggcttagccgcttgcgcgcggagcgtattgctcctaaaccatattatgccctagagcaactaaagcaccaaggccgcgcatcctttaagatgagcctatgaggatcgaaaagttttatgccccgttttattcggaaaatccctatctgcttttagctcccgacagcaaccaggcgctaatagtcgaccccggacagggagccttagagcagatcaaacaggagctatctcgtctagaggcgacggtggcggcggtgctatgtacccacggacatgccgatcatatttgggatgctcatgcggtggccggtaaagctccggtttatattccggccccggatgaataccgtttccacccggagcaactggatcctcgcgaacgcatcgagcatcaactatcactcccgccttggaaagcgcccgaaaacctgcaggtgttgccgggtgccgccaccaatgaaggcgtagaactagctcccggaatttttatgcgagcagtaccagcccccggacacaccgaaggctccaccctattcctttttgaaactcctgagatttctggcaaaggaggcgaggaagcacaaaaaatttacgataactggctagcagaatcagaaagagagcccgaaaagccacaaaaacttgccctctcgggggacgtaatctttttcggctcggttggacgcaccgatctgcccggcggagactcccaacaaatgctgcataccttgcgcaccctacaaaacgtgattgaccccgataccgtgctattgcccgggcacggtccggccacggtcttcggattggaaaaagcccacaaccctttctttgcacaggcaagataccagggataaaaacttttccacagttaatctagtttcaagttttccttgcggacttttcctggctttccgctaagcgcttgggggctggaagcttaaagcatggaagcaatactggtcgatgcgctggaaaaccagatcctgcatggttcggcgcgggcatcattgacccgcgggaatcgttttgcctgctggcggggaactaacgccgagatcctggcggaaccagtaaccctatcttcaatctatggacgcgccctcttcttagctcccctacttccaaaagaatgtttcttaaccgggcattccgcagcctgggtgtgggcaggacaggggcttcctcccgaaaccttatatatcgccagcgcacgccgccccctgcgtgccgccgattcccgcttttgggttcacctcgatgccccctctcgccgccgcttagccaagcgcggcattaaaaccctgggtacccatcgggaagctagctgcccacccattcccctctctgcagggcaaagcggggaaaaccaggccgacttcttgcgtctaggaaaagttcggctgcttagtccccaagcggccttacgtttttgtaaacgtcacccggatcttcccggaggtgacagctggaaccgtacccgcctactcaagctggctagtcagttactttcgtaaagtacgggtagtgcgctcagctgagaacaccccgggaactttgcgaatatcgctcaaaatggtgtgcaaataacgcgaatctgctacctcaaaagtgtagcgggaactagcgacccgatccgaggaggtattcatcgaagccgccaagatattggcgcggtaatcagaaagcacattagtaacgtcgttaatcaaaccttcgcgatctagcgcctgaatctcaatctccacctggaatttagcggtgggatgatcagcccaagacacctgcactacccgttcgggatgagccatcaaattttgggcgttagcacattctttacgatgaactgacaccccgtgtccgcgggtaacgaatccgacgatttcatctccggggagggggttgcagcagcgggcaatcttggtccagatttccccttgtttcattccctccacctggatgccggtaccttcgttccccccaagagggcgagcctctacctgttcgggaagtaccgcttcggatagggtttcttcggcaccgtcttctcccccggcgctttccattagtttgtccactacattggcgggagaaacatgatgcgaacccacggccgcgtagagggcggaaatatcgctataacccatgccggaagctaacgccgtcatagtgtcatgactcatcaggcgctggagcggtagattctgtttgcgcaaatagctagaaatcagatcttgaccggtctcaatagcttcttcgcgtcgttctttcgagaaccaggctttaatcttgttgcgcgcccgggggctggccacgaactttagccaatcccgagaaggtcccgagttaggtgaccgggaagtcagtacctctacactgtccccattttccagtttggtatctaaggggaccagtttgccgccgactttcgcccccacagtccggttgcccacctcggtatgtaccgagtaggcaaaatctactggagtggatccggcaggcaagtctttaacctctcccgcaggggtaaacacatatacccgggaaccggacatttcgtagcgcagcgaatctaagaattcgccgggatcttgggtttccttttgccaatccaccaattggcgcagccagcccatttcatcgccatctgccaatgccgttttattttcacccgcagacttcgcgttcgggtcttctttgtaccgccagtgagcagcgataccatattcggcgcggcgatgcatttcgtaggtacgaatctggatttctaccggttttccgcctggccccaccaccgtagtgtgtagcgactgataaaggttaaacttaggcatcgcaatatagtctttgaaacgcccaggaatcgggttccaacgcgcatgcatttcccccaaaacggcgtaacagtctcgcactgtttctaccagtacccttaccccaaccaggtcatagatatcgtcgaaatcgcgcccccgcacaatcatcttttgataaatggaatagtgatgtttcggccgcccggtaacttctcccgcgatcttatttacccgtagatcttctttgatcttgtcgattacttcccgcagatatttttcgcgctccggggcacgctcatgcaccaagttatcgatttcttcatagagatccgggtaaagagttttaaaagctagatcctctagttcccatttaatggtgttcatccccaggcgatgcgccaggggcgcaaaaatttctagggtttcgcgcgccttattttgtgccgacttgggggatacatatttccaggtacgggcattatggaggcggtctcccagtttaatcaccagtacccgaatatcgcgggacatggagataatcatttttcgcacagtttcggattgtgctgcctgcccgtaggtgactttgtcgagtttagttaccccatcgaccagcagggcgatttcttccccaaaatctgctgtcagctgctcgagagtatagtcagtgtcctcaaccgtgtcatggagcagcgccgccgccaaagtagtgctggtcatcccgatttcggccaggatagtggcgactgctaccggatgggtaatatagggctcgcccgatttacggaattggccttcgtggcaacgcgaagccgtctgataggcgcgttcaatcagggaaatatcagctttagggtgattggctctcagcgcccgtaccagggcttgaatatggggatcaatgctcttagaacgccctgttaaccaggctaaagacgcacgcacccgcgaggacggaaccgcattggcgccctcatcgggagtgatagaagtcatgcatctagtttagtgactcaccagtcatttccccaagtttccagttagaaaccaccaaaggaacggaaagagctgcgtaaataggctaaatcaaagtgagggcttcacattcaaggtcgccaatatgggcgcggccgtcgagttcttccagctccatcaacacgcacacggattctacgattgcccccgcgcgtttaattagcgccgccgaagcatttacggtgcctccagtggccagcacgtcatcgagtaccaagactcgcgcgccctcggcaatagaatccggctgtaattccatccgggatttaccgtattcgaggccgtagtcaatcccgattactggaccaggcagcttccccgctttgcggatcatcaaagttcccagccccagttctaccgctaccggagccgcaatcaagaaaccacgagactccagtccggcaaccaaatcaacccgaccccgataaaagtcagctagtcctttcaccaactgggaaaatgcttctccgtttgccagcagcggggaaatatcgcggaagagtacccccgtttgcggaaaatccggtacgtcacgcagattatcgcgaataattttccctaaaggggcgagtttcggattaatcatcgcttactcctgggggtgcgtttaggttgtgcctgttggccctggtgatgaccagactttagaggttgcgccacccgggaaagctccggagccttgccatcttcctgatcgctgcctcccgcacgccgatccagtaccttttgggtgtggctggaaatcttttcgctgcgagtacgcaacaccatcagcatagagggtgcaatcagaatcgaggacagggtaccggcgatcatccccacaaatagggcaagcgaaatatcgcgcagggtgccgcccccgagagtaatccaagaaatcaacagaatcgaggtaaccggcaatagcgccaccactgaggtgttgatcgagcgcaccagggtttggttgattgccaggttgacaatctcgccataggtggagcgggtttgctgctcgaaatcaaccgacagttcccgcaccttatcgaagaccaccaccgtgtcatagagggagtaacccaaaatggtgagcacgccgatgatggtggccggggaaatctctacccgggtcagcgccaaaactaggccggtaatcagcacgtcatgacagagcgcgaacagcgccgagaatgccatcgtccaggttttaaagtatgcccaaagcattagcgccactaggacgaagaaaatcaccagtgactgcagggccttgaaggtaacgtctgccccccaagacggaccgatagtagtcgccgccactttagcctcgggtagcttataggctttcgccaaatcggtgactacctggcgtttatcagtggtatttagggaaaccgattgtacgcgcactgaggaggcgcctaccgagttaaccgaagatcccttcagtttgggattggcatttactacttttcgcgccggagcttgatcccgtccgctgacggaagaaatcgtgaactctgtcccgcccttaaagtcgatagagcgttccaatcccagcaccgacattgcaatcactgagatcagcattaacgctaccccagccagcagtaggtacttgcggttatcaatgaacttgtaggatttgcgaccagaataaagggcgttaccccaacttgcgaaactcacttgttttcctcctggtcagtcccggatgctgacgccagcgcttccgaagcagcatcatccccactggaatctggtgttgcggtgtctttgctatcccctgctttttccgcggtttcctggggattaggtttatagaccgagcgaatcttacgaaccttgcccgcacctacatagcggtaggttccgcgctgggctcccaaatgctctggatccaaaccggaaagcttatggccttcaccgaagaacttaaagcgcaacagccacaccatcatcgggtgggtgaagatgaagattagcgccaagtcaatcaaagtggtgacacccaaggtgaaggcgaagccttgcaccccgccgaccgccaggaagtagagcacgcaggcagccaacacgtttaccaagtcggaggtaacaatagtgcgttttgcacgatcccaaccgacgctgaccgcgctagaaagggattttccatcacggacctcgtcgcgaatcctctcaaagtaaataatgaaagagtccgctgtggtaccaatcgagacaatcacgcccgcaatcccggctagcgacaggcggtaacccatcgaccaagaaagcaaggtcaataccagatacagtattaccccagcacttactagggaacccactgccaccacggctagaccacggtattgccaaatcaggtagaacaccaccaggatcaagccgataataccggcaataaccccatatcgtagctggtcagcaccgagagtcgccgaaacctgctgttcagattgcacatcaaagttaagcggcagcgaaccgaactttaattggttagcaagagcggtggaagaagaacgagtaaaggagccagaaatttcagctttaccgttagtaatcgcgttgtttactcccggggctgaaaccaccagtccatccagaacgatcgcaaaccggtttttgtcgttattttgccccggtggcaagccattttctcccgcaaccggttggttgcggaacttcatcatccgggtggtaatattcgcgaatttagaagccccctgcttatcgaaggccagattaactacccattgaccagtggactgtccggaggctccggttcccatcccggattctgcagaagaaatccgggcacctgatacctcggccggcgaaaggatatatttttcgtgtccttcgctcgagcaggctactagcggtttcttaatatctccagaggagccgccctctcgagaactcttttgttggcagtctttggcatagaactcttcgaggactttttcggtaatccaagcgtcatccgaattatctttcggctgaccgagcggctgatcgctaatcttgccgtcaccgttaatatcagccatctgcttggcaaaagcctgcgggtcgatattagccttcggggcttccttctttcccgatttttgttgctctgcctgctgcgctatcaccgattggggaactcccggggcagatcgcagcactgcccggaaatacaactcggcagactggcgtaccaaatccaaagtttctttcgagggattacccggcaaagcaactaggatattggagttaccttgagaggtaatctcggcctcagatacccccgaggcatcgatacgctggcgaataacctcaatcgcctgcgtgatgtcttccgcagtcaccgcgcgttttgcaccggatgcgacgttgcctttcggagtgaggatcagctgggtgccgccctccaaatccaaagccagagagggagtaggattcgctttcttagtgagtacccccaccagtaaagttcccgcaagggccagcacaagtaccaggaaaaacgccagtgtgcgcccagcgtgatattttttcttagccaatgttgttctttccgttaagtacggtgattatgtcttcgctgattagttcttttcagccgaatcgctgtcttcggaggaagaatcctctgcttcaccagcgggagtttcgtcctctttgacttcttcttctagattttctgcgggctgtttattttcctcgccagcgccttcagtatctgcgccatcagtggcggaatcggtatcgggagcaaagggcgggttacccacgctaacgacagcccgcgtagtccacagggtttcggtgccatcggaagtttccaatacgattacgtcaccatcggtttctacgtagcgtccataaaaaccggaggtggtcattacccaggcgcccggcaccatttcgtttgccagtttgtcgcgctgatccgcttgccgcttcttagcattgcgtgaagaaaagatcatcatcactaaaaacgtgaggataaccgctagcagtaacccactacccattgtcaaccttccaatctaaatttcttaaccttaatgattctaagcgttaaagcacgtctgtttcatctttcgtgcccggttttgacccgttttgtgaccagttgccccttgattcgctgtcgccgaagtcgaaaagagcggcttcgctagctgcccgcggcggggtcaaccccaaatgagcaaaggcattaggggtagcgattcgcccccggggagtgcgggcaataaagccttgacgcaccagatagggctctgagacggtttctacggtttcgggttcctcccccacggataccgccaaagttgtaagccctaccggcccgcccgcaaaccgttcacatagcgcctgcagaactgagcgatccagtcggtctaggccggcaggatctacctcgaacaggtcgagggcagctttggcagctttcaaggaaagcgtgccgtccccgtgtacctgggcatagtcgataacccggcggagcagacggttagcgatccggggggttccgcgggagcgggccgccatttcggaggctgcctgcggatccagttcggcctccatgagtcgcgccgaacgggtgagtacctggcgcaactcttcggcactgtaatagtccaaataagcggtaaaaccgaaacgatcccgcaaaggtgccggtagcaatccggagcgggtagttgcccccacgactgtaaacggcggtaaggttagcgggatcgaggtcgcacccgggcctttccccaccaccacatctacgcgaaaatcctccatcgccaggtaaagcatctcttccgccgtgcgcgctaaacgatggatttcatcgataaaaagtacgtcgccctcttgcagggcagaaagaatcgccgctagatctccggcgtgttgaatcgccggcccggaagtcagccgcaacgaagttccagtttcatgcgcgataatcatcgccagggtggttttacccagtccgggaggacccgccaaaagcacgtgatcaggggtggtgccgcgtccaatcgccgcttttaacaccagatccaactggcggcgaatcttttcttgccctacgaaagaatccaggtctttaggacgcagcgcggcttcggcggcccgctcaacctcatccgctcccggccctaccggagagctaatcgcccactcgtttgtttcttccactgcgctcccctatgcgtgatgcttgcctaacaattgtaaggccccgcgcaaaagttcgggaactcctgcctgcgggttagcttcggcggcctcgttaaccgccttttgggccagcggagttctccaccctaactgttcgagggcatggcaaacttcttccttgccggcgctaccgattccgccagttggaggtgttcccgcctcgctaggttcgcctagtttatctccgatttctaccaggattcgttgcgcggatttcttgcctacccccgggatttgggtaagagctgtcaggtcactttgggaaactgctgcccgcagctcatcgggactaaaaaccgcgagggcggctaaggctagtttgggtccgattcccgaaaccgtaattagggtagagaaaatatcgcgttcatcgcgtccggcaaacccgaaaagtaaccaggcatcttcccgcactaccaggtgggttaatactttcacctgcttaccggcctctagggtcgacaatgtagcgggggtagcgaaaaaagtgtagcccacgcccgccacgtcgatcgtggctttgtctagtctgacttcttcgatggttcccgatagatgcgtaatcatatagaatctccgctagctggctactggttatagacgctatcttacttgcccttatttcgcctaagccggggatcaaccgcgccggtgcgtcgagttgttgcctgcgcctgcgcccacattttttgggcagcagtcagattcccccgcgaagatattttgccagatagagaaacgttcacggtgccatctcggctcgccccttgcaaaccatcgcgccgccaaccgtgacaaatcgcgatagctaaggcatcggcagcatcggcgggtcgcactactttttccatccgcaaaattcgttgcaccatgtgctggacttgggctttattcgcaaccccggagccggtgactgcggctttaacctccgaaggagtgtggatagctagcggcagcttgtgggcggcggcctcggccatggccacccccatcacccacatggtggaggtaaccgattgcacattatcctgggcgaatacccgttcaatcgacatgacttccgggtggtgctcttcaatagccgctgctattcgccgacggattttatctaggcgaaaatgagaggccatattttgcggagaccgggcaacctcgacatgcaccagctgggcgcgccgctgggaatccatatcgatgattccaattccgcagcgggtcagaccggggtcaattccgataatccgcaaagatattgcctattcttcctctgcttcgtattgctcttgtacttcgtggcttaccgaaagattagtgaacacgtcctgcacgtcatcactgtcttctaaagcatcaattagccgcattacctggcgatacttagctaaatctagctctgcttcggtggtagctttccactgggattctgccgaatcatagtcaatgccggcttcttgtagggctttgcgtacctcaaccagattcgtgggatcgcaaataacggtgaagttttctgcgccttcttcgacttcttcggctcccgcgtccagaaccgccatcaaaatggtgtcttcgtctacgccctcggctttagcgacctcgatagcgccgatccggttaaataggtaggaaacggagccaggatcagccaagttgccgccgttcttgctaaaggcagtgcgcacatcggcggcagcgcggtttttgttatcagtgaggcactctaccagcatcgctactccgcccgggccgtagccttcgtaggagatagtctgccagtctgcgccgcctgcctcggcgccggagccgcgggcaactgcccgtttgatgttatcggcgggtaccgagttctttttcgccttctggatcgcgtcaaatagagtgggatttcccgcgggatcgccgccaccggtacgggctgctacctcgatattcttaatcaaccgggcaaatagtttaccccgcttagcgtcgattgccgctttcttatgcttggtggtagcccactttgagtgacccgacattcgctctccttagttccgctcgcggataaatcaaaatacaagcccgattttagcgcctttgcgccctcagcgtctaaatagccttaatcgtagacgctgaggcagttgccatcccaaccgctaacccactgctgagccagttccgggaggcaattaggatagatagtttcccgctcgcctaagcgcgcaagttctgtaaggggaacccagcggatatcctctaaaagttgcttttccgagggcgtccacttggcggtaaatgcccggggtgcatctgcatttagatgcaccaggaaataatgttctgcctggatggcccaaagtttgcggaactttagcaaagattcccggtaaagcaccgatccttgcagctgaccaagattcagggtgattccagtttcttctttagattcccgcagagccgcctgcgcgcgggtttctccgccttcaatcccgcctccgggggtaaaccaccagcgatgggtgggatcagaaaaatcgtgtccactgattaagaggatgcgccctcgagaatcaaacgccactatccgggcagcgtggcgacccgggtagccatcctgatcgaccggccagtcgggagcgagcggattttctccgttaggcggaaaaggattcgggagcggacgcggcacctgaaaaccggagctcaccctaggatcgccccattcgataggcacctacgggggcgctagcacgagcaaagtccgctcgagcctgcaataacttcttgaccgtctcctggttttctttttctacacttgccgagaggccacgatgggaactggaaacatagtttaaagccagaacggtgcaggcttgttggaaaaccgagagagcccggcgggcagcgggagaaatagtgcgagcggatttgcgggcacgccgccgtccagacagcgaacaaagcatttgtgcttctcgcacatcaatccacccagcagcgatataggcttgaagaccgttttcgatcgcattgcgttgccgcaccgaaaccaccaggttaatagctagccaggtgataaacatcggtccccagaagaacaggtaggaaaccaggaaaagcaaagcagaataggtggcgagaccattccaggcggcatgcaaacagatggcggaagccagtccagaaatcgggagaataatgcgcattttgggggaagccacccgggtaagagccatccccaaggctaagccaaagatcgaggtgtagacggtatgaccgaagggaccgagcatggcgcgcatgaagaaaaccacggggagctgatcgtaaaaacgcgcaaagtagagcacgttttcagtaaaggcgaagccagccgccagaattccggcaataactaccccgtctagagggcttttcactgagcgccgcctggtcaacataatgattactaccccgaggccttttagggattcctctactatgggtgccacgatggtggccagaaccccaaaagattggaagggagtaggcccgaaatctactgcttgcagcgcttttcctgaaaacgtatttagtcctaaggcgcaggcagaagcaatccctgccccccagaggaaggccactaccagcagccaccacggttttggcgcccagcggtcaagccaaaccatcacaatcactacaatcgccatcggtaacagggcagccatcaccgccccaatcgtggtggcaactgactcttcagcggagataaaaagcgcgaaatagctaagtccgcccccggcagcgattaaacaaagaacttctagccagggaaaagagcgcatccgggaatggcgactagttttttctgctcccggatctaccagcagcggctgcgaagatactcgctgtgaaatcgccggatgcggaatcaagggatctactggcaggctgagggcatcgaaactgtaatcttgtactagctgctccggtagttgctgattgttagccgcaggaccaggttgggcaagcgaggcgggcgagtatgccgggttcatctggctcacctatttctcctttgctgggctgatactagtctaaccgggaaaacgcattttctcttattagcattaccaaaaatagataaccgctattatcgctagttttcgggtgtttgcttccggcagcgttcatagaccgctaatacttggtcagtgaccaccgaccagtcgtaacgttttgctccctggtgtcctcgctttgctaagcgggcagctgcttctcgatcttcacaaaccgccagcagcttttcagccagtgaggccgcgtcctcggaagtaaaaatctcaccgaggcgcccctcctctagtaccgctgtgaaagcagggattgaggaagcgactaccaggcagttagatgccatcgcctctaccagtacaatcccgaaagattctcccccggtttggggcgcgatataggcagtcgccgagctaaacagcgcgattttttcttcttcgctaagcgctcccaagaactcaacgctgtttccatagggcgctaaagtagcgcgggcacggctggcgtttcccggtcccgcaattaaaaaccgcgcctggggataggacgccaaaactagcggaatcgcttctaccaggattgataatcctttgcgaggttcgtctaggcgccccaagaaacagaacactggcgattcttcgctttgttgccactttggagtgggacttgcctgcgcaaaagcctgatagtctaccccgttcgggatcacggtagcgtccccaccttgatagcgctgcagagttctccgcgcttcctcagagactgcgatttgcgcactgagtttttctttaaccgactgcaccaccggtttgcccaaggtgtagagcaaggatttctcgatggcagcatgaaaagtacccaccaccggacagcgcgcatgctgtagggcaattagagacaccgagggcgtggccggctcgtgaacatgcagaatatcaaaatcactggtagtaacccattggcgcgtgcgcgccgccacccgcggcccaaatgccaggcgcgcaacggaaccgttataggggattgcaaaagttttccccgcgtttacaaacccatcctcgctatattccgtttctaccggggcaaatacggaaacttcatgaccgcgccgccgcagctcttctgcctggtcacgtacatgaaactgtactccccccggcacatcataggcgtaggggcagacgatcccgattttcactgctgcgcctccttccggctgcgctgccgcgcccgctcaaggcgaactggatctaaatcagcgacaaataatttttgcagcatgaaccaagattcgggggaatccacaatcatctccccgactttttccgcccaatcccgagtcatagtttctaccttatcgggctttatcggtccggcaaggttaatcactattccccaacgcgagcgtgcagcccggcgtcgtgagtgcgcgagctgttctaaggagatatgcccgcaataaaggggagcattaattttttgcgcaagggcagccggacctgctgctaacagggcttttgatttccccaaagtcacttccaccccgttgccggtaatatctcggtcagcgagcagcggtatcagatactttccttcttccgcagccgccactaagtttgcaaaaggtttttcgcccttgttggccgcaattatccgcatattcgcctgctgccgtacctgggtaaatgcctggaatagggcttccggttttactttttcagccacagtcagtaccggtcttacttctttactagcaaagtagcccgcgagatcccagttgccagaatgggtaagcgctaaacacacgttcccgcgcgcacagtcgtctaagaaaacttcccggtcaccctcaatccgcacgcgggcaagaatttgggagctggaaagcctccctaacaaggcggtttcggaaaatagccgcatatagcctttaagcccctgccgtactgttttttcaatgctattttccgggattcctaaatgtcgcagattcttccgatactgtctcgcgccggaagtatctatccggtaaagcacttccccaatcaggcttccgattccctgagccccgcctagcggcagatacgagagtagttttaaaccagttcgcgccagctgagcgctagaaaatagctcagttttcacttatttcaggtgctttctgacgtaaaggattctttgtaccacggtcacgaaacttgcgaaagctacccaggaaagcgcaatcggaaaacagatctccggcgctcccaaatcggttatgcctgcccctactagggcgactactaggcgatcggtgcgctccccaatccccactttggcaaccacccctaaggcttcaccgcgagcacgcacatagggaactgccgctgccccgactagggcgcaaatagcggcaataatggtgaaggtgcggatgctccccgaagccatcccgctaatcgcccagtacagcagggagccaaaaatcgctccatcagcaaggcggtccagagaggaatctaggaaggctccaaagtcgctggtctgattggtaagacgcgccaaaaccccatctatggaatccgcgaaagcggttatcccgatcaggattcctcctagcgctaaatagccgtgtgctagcagcccgatagccagcgccatattgattatggttccggcaatagtgaccatattgggggtgacccccgctttggccagcagcttggcggggacggtgaaaattgcgcgggctagaccccgcccatggttacctagcatgatttatccttgccagccgttagctatctgttcgcgtgcatcccccaaaagctggggtactgctttggtgtgagcaatcagggggaagaaattggcgtctcctccccagcgcggaacaatatgttgatgcaggtggccggcgatgcctgctcctgcgacctccccttgattcattcccaggttgaaacccgcagggtttgccaccttttgcaaggttctaatcgcttgcgcggttacttccccgaattcggcgcgctcgtcctcgtccaggtcaatgtattcggatacatgccggtagggacagatcaacatatgcccggagttataagggaagaggttcatgagggcgaagactttttctccccggtaaacaatcagggcgtcctcgtcgctgcgatggggagcggcacaaaacggacagtcttcacttttcttggtggccggacgtgcctcacccgagatataaacctggcgatgtggagtccatagacgctggaaggcgtcgggaactcccccgaagcagcgagaatcttcggtcggcagcgcgctagaatccggcgaggtcataagctatttccgttctgcgattgcggcagtgatcttagcgattgcttgctcgatcggtaccccgttttcttggctgccgtcacggtaacggaaggaaaccgcccccgcctcggcatcctcgcccccggcaatcaaggtaaagggaatcttatctttggaggcgttacggattttcttcccaaagcgatcatcggaggtatcgacctcaacccggactccttgtttgcgtagctgggctgctacctcgaacaggtagtcgttgaaggcctcggctaccggtacgcagcgcacctggacaggtgccagccaggcggggaaagcgcccgcatagtgttccaggagtaccccaaagaagcgttctatcgagccaaacagggcgcggtgaatcatcaccggacgctgatgggaaccatcggcagcagtgtaggtaaggtcgaaacgttccggcaggttgaagtccagctggatagtggacatttgccaggtgcgcccaatggcgtctttggcctgtaccgagatttttggcccgtagaaagcggccccgcccggatccgggactagtttcagtccggaagcagtcgctacctcttccaaggtgcgggtagcttcttcccaagtgtcatcgtcacctacgaacttgtcgggattcttggtggacagctccagataaaaatcctctagcccaaaatcttttaacagatccaggacgaaagttagcaggctggcaagctcatcgcgcatctgttcgcgggtgcagtaaatgtgggaatcatcttgagtgaatccgcgagcgcgagttagtccgtgcaccaccccggatttttcgtagcgataaacggtgccgaactcgaaaagccgcagcggcaattcccggtaagaacgccccttggaagcaaaaatcaggttatgcatggggcagttcataggcttcagatagtaatcttgcccctgcttggtgatattgccttccctgtcatgctcttcgtccaagtgcatgggcggatacatgccatctgcataccaatccaggtggccagaggttttgaacagatccgccttggtgatgtggggactgtaaacaaaggaatacccggattcgatatgccgtttgcgggagtattcttccatttcgttgcggataatcgcccctttggggtggaataccggcagaccggagccaatctcgtcggggaaagagaacagatccagttcgcgtcccagtttgcggtggtcgcgccgctcagcctcgcgaatacgggtttggtaggcaactagatcatctttgctggcccaagcggtgccatagatgcgctgcaggtgatcatttgcttgatcacctttccaataggcggcggaagatttggtcagggcgaaaccgttgccaatatagcgggtgttgggtacgtgcgggccgcggcagagatccttccaggcgcactcgccggaacgctcaacattgtcataaatggttagtccgccggcgcctacttctacgctggcaccttcggcttgatcaggcccatgacctttggactcgatcagttccaacttgtagggctgatcagcgagttcctggcgggcctcctcgtcgcttacttcccgacgcacaaaacgctgcccacttttaacgattttcttcatccgtttttctaggtcttttaagaactcgggagtcaccggatcgatattgccgaaatcgtaatagaacccgtcagtgatgtaagggcctactcccaggttggcatccgggtaaacctgttgcacagcttgggcgaggacgtgggtagccgagtggcgaataatttctagtccggcctcgctatcagcggtaatcggttctacctgtgccccctcgggcaaggtacgcgccaggtcccagggctcgcccgcaacccgcatcgctaccacgctgcggtctttgccccacaaatccaggccggtgcaagtggcagctacctctttagtttcccctgcaatctggacgttgattagccctgctgcctctgctgccactttcgatcctcctagttacggattaagttattacctggctattctacctaggtgctcattgcgattaaaatgaagccgtttctacttaccctactagcggagggcagttttacgctcgttggtcgatacgcgcccagtcctactggcgctttgcatttggggaatctgcgcaccgccctaatcgggtgggcgctgtctcggcaaggcggcgggcgtttcgtgctgcgttttgaggatttagatgcccgctcgcgtgatcctttccgcgccctacaacttagagatttagcggccttggggattgattgggacggggaacctttggtgcaatcaagttgtatcgggcgctatgaggaggtgtttgcgcagcttaaagcggaggggctggtttatgaatgttattgttcgcgccgggaactatcgcaagttgcttcggccccgcatactcctccgggagcatatccgggctattgccgcgacctcaccccggccgagcgcgccgggaagcgggaagaactttcaaaagtaggacgcggccccgctcttcgcctgcgcagcaaccaagaaactttgaccttcacggacgcggtttacgggccgcagaccggggtggttgatgatttcgtgctacgccgctccgatggggtgttttcctataactttgtttgcgtagttgatgatgcctatcaaggggtctcccaggtgtgccgcggccgggatttgctttcttcggttgcccggcagaactatttacatcagctattagggtctatcccgcccaactgggtgcatgttcctctggtgctgaatcaaaaaggagagcggctagctaaacgggatggagcggtgactttagagcagctgcgcgcctgcggaattgaaagcccgcaagtgatttcgatgctggctacttccctgggtttcccgcccgccaaaactgccaaagagttccttgcccactttgacttggggaaaatgagccacgaggattggcgttttcttcccccacgttagggaaacagtggtttaggaagaaaacacctgttggataccttgttcgcgcatgatctgtttcgctgcctctacctgttctttagtaggcaccggggtgtctgctagttgatagtccaagcccagattttcccatttgtcccgagccatctgatggaacggtaagatctcgaggcgttccaggtttggccaacgctgggcaatctgtgctactttcgcaatattttctgggtcatcggttagcccaggaaccaacacgaaacgcacccacaccgggactttggcttcagctaaacgatcgccaaaagtaatcgtaggggcaagggcgcgtccagtcacttggttgtaggtggcttcgtctccacttttgacatccaagagcactaaatccagattctttaaatcagcatcggccagattggcacctaagaatcccgaagtgtcgaggcaagtatggataccttcctggtgacagcgtcgcagcaggttttgcacaaaattcacctgcattaaggcttcgcccccagaaatagtcagtccccctccggtgaccttaaaaatagcacgatagcgttttaccagcttaaacacatcggcaagggtgactgcatgaccagaacgcatctggaaagtatccgggttgtggcagtactggcagcgcagggggcagccagataaaaacagggtcattcgggtaccggggccgtctacggcagtcaccagttcccaggagtgcactgaagctagattgccttcgcggacagcctggttgtgctgggagtggctcatctcgggggcttctcttagcgctcctaaaccggaaccgcgcgtacgaggaacttgctcttctaacggctcgggagcatattctccggtaatcccatcagcactgacgctgatattttcggcaccgccagttatttccattagccccgccttgtctgtttcctttggtgaatactcgattctatttatggtgagggcgggcatctccttgcagaaggaagatacccgcccggcaccaatatttaaattttagagttggttatggaaagtacgggaaataacgtctagctgttgttcgcgagttagcttcacaaagttaactgcatagccggaaacccgcaccgttagctgggggtatttttccgggtttttcattgcatcttctaaagtgtcgcgatttagcacgttgatattagcgtggtagaggccttggactcctccgcgtgcttcgcgattggctttcatggaagcgagccgctcatcgaaagtttttacactcatggtttctcctattttatttgtttcttgattatttctagttctatttctgccctaaccggctgcgtttacgccttataaaagcaccaggtgctgctgcaggcagagagttttcagtaggaagagtcttggggaatgaaaccggcgtccataatccccactaggttctggatctgttcctctttggttcgtcccagcgaggagggcacgatggtgttggtcaaagaaataccatccaacgcgtcatggtaatccagtttgcctaccgagagcatcgaggccagcatcccatgcgaatccattccattttccgggttggcgccgggagcaaagggggttccagcctcatgcccggaggggaaagccccggtggctttaccgtaaaccacattggaggtgatagtgagtaccgactgggttggaatggcatcccgatagagtttaatttctttaatctttgccattaccgtgtgcacgatggtggccgcgatgtcatcgacgcggtcatcgtcgtttccgtagcaggggaagtccccttcggtgtggtagtccaccaccaagccggtttcgtcacgtaccggggtgaccttggcgtatttgatagccgatagggagtccgccacaatcgatagtcccgcgattccgcagcccatggtacgtacgatatcgctgtcatgcagagccatctctaggcattcgtaggcgtaacggtcatgacagtagtgaataatgttgagcgcctccacataggtgcccaccacccagtccaacattttctcgtaacgttcccacacatcattgaagtccaggggaccgtcgccaacgataccttcatatccgggcactacttgcttgccggttacttcgtcgcgtccaccgttaatcgcgtaaagcagggttttagccgcgtttacccgcgcgccgaagaactgcatttgtttaccgactctcatgggggaaacgcaacaggcaatggcagcgtcatcgccccactggcggcgaatctgatcatcggcttcatattggatagaggaagtttcgatggaaatcttcgcgcagaactctttatagccttccggcaaacgcggggaccagaaaatagtgatattgggttcgggtgccggccccaaatttattagggtctgcaaaagccggaaggaggttttggtaacgagggtgcgtccgtcctccccgaaacccgcatctgaccaggtagcccagtaggggtcaccggaaaagatttggtcataggcttcggtacgtaggaatcgcacaatccgcagtttaactaccagggcgtcaatgatttcttgggcgccctgttcatctagggtgccttccgcgaaatcacgttcaaagtagcagtcgaagaaagcggaaaggcggccaatggacatggcggctccgtcttggctctttaccgcggccaagtagccgaaataagtccattgcacagcctctttagcgttctttgccgggccagaaatatcgaaaccgtagctggcagccatggtttttaacttcttcagcgccttgatctgctcggagtgttcttcccggtagcgcgcccaatgttcactaaaaggtttgtcggcaactttgtctttatcatcctgtttccaagcgattagctggtctaccccgtatagggcgacacgtcgatagtcaccgataatccggccgcgtccataggcatcgggcagaccggtgatgatgtgggaagatcgagccgcccgaattcgaggagtgtaaatatcaaataccgcgtcgttatgggttttgcggtaacgagtaaagatttctttcacttccggattgatttcttttccggcttctttaatcgcggtttcgaccatgcgccatccgccgttgggcatcatcgctcgctttaagggggtatcggtttgcagaccaacgattacgtcatcttcttcgctaatgtatccgggcccgaaagcatcaatatcagccggagtgtcggtgtcaacatcgaagactcgtttttgacgttctattgaaagatagttttcctctagcgcttgccagagtttctgggttttggaggtcggtccgcttaagaaagctgcgtcgccctggtagggggtgtagttcttttgaatgaaatcgcgtacatcgatttctttattccatttcccctggacaaaagtgcgccacgcattatccgttgaattctctacggtagtagacatcaattattcagctcctccggcaggattgctgccagtaagggtacttatttttgcagatatattttctcaaattaaagtcgtacacacaccctcaaatggataagtgcaacctaagtcatagattaaactcaggttgctattatccccagtgggaacgcagcggctctcccccataaaaatcgccgaggacgcgctctttatatgccgggtaatcaccctcaataatggattgtctaatcccgcgtaccagctggacggtgaagtattcattgtggatggtcgccagggtaaagcccaacatttctttagctttgaacaggtgatgcaagtaggcgatcgaatagttcttgcaggtgtaacaattacagcccgccaccggagcccggaaatcgcgtttaaattcggagcgggtcaggttaaagcgcccataacgcccataaagtccgccgttgcgccctattcgggagggattcacgcagtcaaaagtgtccgccccggcctctaccccggcaaaaatatcgtccggttcgctaagtcctagcaggtggcggggtttattttccgggagttcttcgcagacccaatccacaatggtggccaggttttctttctcaaaagcgcccccgattccaaaaccgtcaaagcggcgtcctgccactttcatcccggacaaatcgcgggaggctttacgccgcaaatcttcatattgtgccccttgaataaccccgtaaagcatctgataaggcttatcggcacgctcctgggtgaggcgctcatgttcggctaggcaccgctccgcccaacgccgggtgcgctccagggattccacctggtattcgcgagaattcagcaaggtagtgagctcatcgaaggccatcattatatcggcgcccagctggtgctgaatctgcatagaaacttcgggagtaaaccgatgctgggaaccatccaggtgagagcgaaaagtaacgccctcgtcatctacatgggcgtgccgttccttcttgtctgccaccgtatggtcggcgcgtcccgaaccggtgaactcgcccgaaagcactttcttatagccagaacctagggagagcacctggaagccgccggagtcggtaaaagtggggccatcccagttcataaagcgagctagcccacctgcctggtcaataacctcaggccccggctgcaggtagaggtgataggcgttagagaggatcgccgctgcccctaactctttcatggtttccggcagcaccgttttcacagtggctttggtgcctaccgggatgaaggcaggggtgggaatatctccatgcggggtatgaataatgcccgcacgtccccgccttccgggcagatccgctactttagtgaaggtcaagaccgtacccctcatgtttcttaacccgggaaataaccagataggtgaaaggcaggcagaggatttccaccgcgcatttatagaggtagccgccgaggaaaatatagattagcagctgggagaaactcatgattcccccaaatgcgatagtacaaaacacgatggaatcgaccagttcgcctgccaaggtggaggtgactaggcgcacccagagattatcctcgccccaacgctccttgattttcaccaatacgtaggcgttaagccagttgcccagaacgtaaccggccatagaagcgattacaatccggggaacaaaccccaggacgctctggaaggcagcgttattatggtaagaggcttcgggagggagcatgcccaccacccagaaggtcagggaggccattacggaaatcacgaagcccatcaaaatggcacgctttgcagcgcgcagtccccagacttcgctaatcacatctcccaggacgtaggtgagggggaaggtaatggctcccccatcaaaaacaatcggccccagttgaatcgccttagtggcgcaaatattggcgatcagcaagaatgccacaaagaaaataacgcaaatatcaaagagaccacgcgggctgcgagcaaaagttgcggcaccgcggactagtgaagaatcctcttgatcgcggactgcagactttgcgggaacagatttgtcagatttttctaaagttgtcacccgcctaatctagcagccaccccggggtactcgtccagttagccccagactgcagctataggttcttgtttttatgctacttggagataactgtgttccggtgcgcagataacaagcctcacgggcaagggtttttcctcctgcccaaaaactcgaaaaaatctaaagatatttttcgagttttacgcccacctagcccactcggataaaacccttgcccgcgccgccttgcgttccagcggtaaagcctaacctgaacccgtaaccgcgcatacgagaaaaatattgccagtgcagtctggcactaacgggaaacctaaaataaaaatctctgaactatttacggaggaaaaacctctgcccgcgccaacaccagatgcctcagaaatcttctggcttttatagagggattctacgcgctgtcgccattggccaggcggcgcagctcgggccacagctccgaggcgatcgtgcgccgcaaatcttcgcgggtagtatcattaaccagctcaaagttggcaatcgcgcggcgttcttcctcgctggcttgcgccgcaatccgggcatctacctgttccggttctaagccggagcgttcttgcaggcgctggtaacgctgcttaaggggcgcgcttactgccacaatcacgtcaaaagcgcgcgcgttcggattctcggctagcaacggaatgtcgtaaatcccgatatctccaggagtgagagaagcaaagaaacggtcagaaagaaacgaaatataggggtgagttattgattctaagaggcggcgagcatcgggattattaaacacgatagctgctagcgcactgcggtcaacgccgctttcccattcgggatggtcaaacgcgcgggcaatatcgggggctaaatcttccagagcctgccccgccagttcgtcggcgctgcaagtctttgcccccagagctttgagagtatgcacggtagtggatttaccggagccaatcccaccggttaccgccaccgaaagggcgttcgtaggcgaggctgccgcccaacgcgcgccccgatccgggttgcgataaatcaatagttcactcacgccctaagcctacccagcgattcctcttccacccaagcgaggttccataagaggcaactaaatctgcttctaccggggagcggatattgctttagcgattggggggtttcacttttcccagcccagcacatagttgtgtttgtaatcatcaaaggcataccacaatatgtttccttgggagtctttccaaatcgcatcccagtagtaaccggagtccttaaacctttcgggtgaaaccgccagggaggaatccgcacccggaaagggcaacaaatccggaacttcttccaagggaaaagcagattctgttagttcaatacaggcttccgggggtaatactgcggtataacttccatcgagcattctcaccaagttgtccttaactacccgatattccgtttcttcatttcgggacacttcggttagctgtcccatatctcttccgccgatggtaacgtcattccagttagagtcactgtaaagatatttaacttttaaccccaggccttccgccgcagataaatcaaccgcgaagagatttccggtactgcctcctccaccacaaaatgggccattagttggagaggtcaaaggagaatccatcaactttggtttttgaccttggggatcccaaatccacactagaatccgctccactaccccctgataggtgtattccccctgatcaccttcgggcatttgtcccccgacgtcctgatgatagataacctgagcaaaatcgaggtagccatcaccattgatatcggcatacaccttatcgttttgtctaacgccgacggctaggcctatataacgattggggtctggcgactccttgaacctgccatcggtaagtttgcgcgcctctcccttggcattggcgatatcaatattctggaaatctaccttcttgattgcatcccaaccgacaggcttttcactgcccggatccggcgccccgggaacatcaaatctttggtaactgatcttccccttactatcggtggtacgcgtagcccaaatagatttactattggctgccaaggcgggttgcccctgcaggctagttttccagatagtcttgcctttttgcagataactaaccgttttagcctgcttagcggtaggctcggcgcacaccgttacttggctatctcgataaattacctcgcctgcgcaattgccggttttagcggcagctgccggggtattttccttctcccctagcgcacctttacaaactatctgaccgccgaatacctcatagggttgcgccaaaccattatcgcaggcaggcagactaattggttccccttttactttcccatccaaagatagaggctgggcactaggcccttcgctagtaataaaaattagccagatatctaggctttccttcactattactgccggactagattcagtaactacgtaaggcgtaaacgaatcctcttttatctgcttatgtacctctaccacagtggaaacggtgggtgtttttgccttggtcagcaccgatcccagtttgccgctgtcgccggaaagcacaaacaagtacacagttagcgccagatcaatcagcaccaaagtcactagcaccgctaacagacgcatcaccaagcgcccctttgcgctggcagcagcggaaacttgcttagttttcatcgccattcacctaccaaaaaccggctcaccatagacctgaggtaatattccccaggtgttccgcgagagtgatgattgaaaccggcagggcaaatgaagtaggcagcgccatgaaatgggtttttaccagtatgaaaagtaaaaaagccaggtacgctaccgcgattacaatcccgattacgattaacataacggcaccattatgcgccgaagaagttttctgccccactagattcgggttaccgctagccccggagttagcaccacaagcgggatttacatgcgggtatgttgcagggatcgcccccggtaaagctgcaggagacaccggagccggctgcatgccggtagcttgtcccgccaaatgcggcggggaagccggcaacggggtggaagtgcccggctgccttgctggtatcacccgccctgggggtccatagggacttggatgttgcgagctgaagtgcaagttcccggttttgcttccctcgtcatcgttacctggcgaatgattcatagtttcacgctatcaggggtgcgctcagcaaagtggaagatagaaaaatcccaaatgtttccggacaaataaaaagggtgggcagaagcatttttgcttctgcccaccctgaaagttaagcgccacagctcttggttagagctacaacttgccgctattcaccggttagcttctcgcgaagagcagctagggcttcatcggaagccaaagtgccttcggagtcttcactctcggtggagtagctggcgttctccgcgggatcggggcgggtattggcggcttcagtgtcggcttccagagccttagccacctgttccttgtgcgccttccagcgggcttctgcctgggcgtattcttcctcccaagcttcacgctgcgcctcgtagccttccatccattcattggtttccggatcgaagccttcggggtatttgtagttgccctcttcatcgtattcggcggtcatgccgtacagcgaaggatcaaactcggaggtgttggggtcaacgccctcattagcctgcttaagcgacagtgaaatccggcggcgatccaaatcaatgtcaataaccttgacgaatacttcggacccgactttaacaacctgttccggtacctctacgtggcgctgtgccaattcagagatatgcaccaaaccttcgataccgtcctcgacccgaataaaggcgccaaagggaaccagtttggtaactttgcccggcacaacctgcccaatggcgtgggtgcgagcgaaggtctgccacggatcttcctgagtggccttcaaggacagcgaaacccgttcgcgatccatatccacatccagaacctcgacggagacttcctgaccgacttccaccacttcggaggggtgatcgatatgcttccaggaaagttcggatacgtgcaccaggccgtctactccgcccagatccacgaacgcaccgaagttgacgatcgaggaaaccacgccggaacgaatctgacccttttgcaaggtatccaggaactgggtgcgtacttccgcctgggtttgctccaaccaggcacgacgagacagcaccacgttattgcggttttcatccagctcaataatcttggcgtccagttcgcgcccgatatagggagcgaggtcacgcacgcggcgcatttccactagggaagccggcaagaacccacgcagaccgatatccaagattaggccgcccttgaccacctcaatcaccttgccggtgactacgccgtcagcttccttaatcttctggacatcgccccaggcacgctcgtattgggcgcgcttcttcgaaagcagtaagcggccttctttatcttctttctgcagcaccagggcttcgatttcgtcgcccacctggacaacgtcttcggggctcacatcatgtttgatggatagttcgcgggaaaggatgacgccctcggttttgtaaccgatatctagtaggacttcatcgcggtcgacccgcacgacagtaccggtaacgatgtcgccatcgccaaagtacttaatagttttatcgattgcagcaagtagttcttcttgtgaaccgatatcatttacggcaacttgctcgagttgctcattagaggtggtcatagagataatttctccaaaacggacttaatagacaatatggacaatttggctactctttcaagcagccttgttgagcctatcagcaaaaaccctttcagctccaactcaaaaagcccttgcggagcggattttcgcaaattgtatccgattacacagtgttttcaggtgtcgaggacgagcccaggccttcccggattcgctccccttttaccgcaaaaaatatttcgctagtgagcggcgctccgccaatttccgcctaccccgataccgactactaggggaactgctaactgggcggcgtggcacatggcgtcctctaccaaggcgctcagctgggtttcctccccgaccgccacctctaaaatcaactcgtcatgaatctgcaagagtacccgcgaggaaagtttcttcgcctttaattgttcatcaacccgaatcatcgcctgcttcatcaaatcggcagccgtaccctggatgggggcattaagggcagcgcgttcagccatccgccgcaaagtgtgattacggctcttcaaatcgggcagttgacggcgccgtccctgcatagtttcggtatagccccgctcgcgcgcctgctctacaatctgatgcaaataactgcgtactttcccgaaacgctggaagtaactttccatcagtttttcagcttccttttgcggaatacgcagctgattcgccaagccataggcggacaagccgtacgccaaaccgtaggaagtcgcttttacctgtgaacgcatctggtcatcaacctgctcggccggtatcccaaaaatcattgccgccatggtgcggtgcagatcttcaccggtactaatggcagcaatcaaatcttgatcgcccgacatatgcgccattacccgcatctcaatctgggaatagtccacgctcatcagattctcgaagccctgaccactaacgaaggcctcccggatacgttgcccagtatcggagcgtaccggaatattctgcaggttcggatcggcagaggaaagccgcccggtagcagtcacggtttgcttgaaagtggtgtgaatccgtccatcagcttgcaccgctttttgtaacccttccacagtctgcaaaagctttatggagtcgcggtgcgccaacaaatactgcaagaaaggatgctgggttttactaaaaagccattccaaggcatccgcattcgtggtgtaaccggtgcgagtctttttggtcttgggcattcctaactggtcaaataagacttcttgcagctgtttggggctagaaagatttaattccggccggtctacttcgctcctggctgcctgcttagcgtcctcggtttgccgccttaaatcatcgcctaaatctcccagaacctggtcggatactgcgattccggtatcttccatccgcgccagaatctcggcgatcggccgctccatctctaaccagagatgttcggcgctacccgcggatagtttttgctgttcggcatgagcaatctcgggcagtacggctgccacctgggcagtcttggtattggaggtgccagaaaaatctagagcggtctggccgctgtcttctttttcctctagttccagggggtgccccaacattttttggctcaaaacctcaatatcgtaggaacgggcagaaggatcaatcaggtatcctccgatttcagtgtcccaggcgggcagccccaaccggaatcccgcccctttaagggcgtgccaagcgctcttccagttatgaaacactgcttggtccggattttctagtaggcgttccaatgccgaaatttcagcctggctagcgtcaatcaaattaatgctcaccgcttcatcaccgctggctatagtaatttgctctgcgtcgccctccccgggagcagaaaccccttcaactatgatccccacggggtcggaaagatcatttatccagttagcagccttattttgggcaataagtttaacttcgggacgttttttcgcaggctcagttccgagggcgaatgcaggaatactagctagagccccgcgggtaccctgcccgatctgcaacttgtctagtagtttgcctagctgctcggcatcggctttcccaaaactcagttcttgaacttctagccctaaatctaggtcggtcagcagagcgttcagtttccggttacgtttaacctcctccaggtgagcgcgcaggtcttctccgcgtttgcctccaatatcggcggcatgggcaatcactcccgtcaggccgtcatatttatttatccaggcggcagcagttttctccccaacacctggcacacctggcaagttatcggctttctcccctaccaaggcggcaatctccgggtagcggcttggtggcaccccgtatttatcttcaatagcctgcggtgtcatccgttttaagtcggtgattgatcgggacggataaagtaccgtaacctgctcgtttgataactggaaggtgtcccgatctccgctagcgaccagcacctgcattccggccgctgccccccgggtagcgagggtagctaaaatatcgtcggcctcgatgttctcttgttctaaagtggtgactcccaagtggcgaagcgcttctttaatcagatccacctgccctaaaaactctggcggagtgggtttgcgtcctgccttgtactcaggatattcatcggtacggaaagaatgccgggagacgtcgaaagcgactgccagataatcgggttgctcgtcctgaagcatttttactagcatccgcaagaacccgaacaccgcgttggtatattgcccctcttgggtacggaaattttcgggttcgagggcataaaacgcgcggaaggcggcggaatgcccatcgattactagcagagttttcttttcgaccatctgttcctcctaggaactatcctaagcgaaaggccgccccgggttccccggaagatttggttgctcccagtaagcgttaacccacctgatcaataactgcctcggcgacttcgcgcatgctgagacgccgattcatggaggtggtttgaatccaacggaaagcttccggttcgctcatctccatattttccattaacagccctttggcgcggtcaaccaatttccgggtttcgaagcgatcttgcaagtcagcgacttcgttttccagcgattggatttcgttgtggcgggaaatagcgatttctaccgccggtaaaagctcggcgggggtaaagggtttcaccacataggccatggcgccagcatcacgggcccgctccaccaactctttttgcgaaaatgcggtgagcatcactaccgcgcaagagatttctttcaaaatcttctcggcagcggtgatcccgtccattttcggcattttcacgtccataacgcacaggtcaggctggtattcgagtgctgcctgataggcggcctccccgtctccggcttcggctaccacctcataaccggcttcggtgagtgtttccacaatatccagccgaatcagggtttcatcctcagctaccagcactttgcgcgccgtgttctgttctttctttgcattagatttcgaagttcccacgtgtctatattagactgaaacccgtcgcgctttacagcgttacagaaaagcctcgatggcggaattggtagacgcagcggattcaaaatccgccgtccttcaccggacatgtgggttcgagtcccactcgaggtactaataaggtgcttaaccccgctatagcggggttttaccaattgcttttgattactttccctcaaatcctaggaacgcttgcggcgttcgcgtacccgtaccgaaatctggatggggctgccggtaaaaccgtactgttcacgcaagcgatgttcaataaaccggcgataagagggatctaagaatccggtagtaaagaacacgaaccggggaggcgccgccgaaacctgggtggcgaacataatccgcggctgttttcctcccctcaccggatggggatgttcggccactaagcgccccaagaaactatttagttcactggtagaaatccgggttcgccaaccagcaagtgcctgcgctagcgctccttgaatccgattggtgtgccaagcagttttggctgaaaggttgatccggggagcccaatccacatgagaaagctgcagttcccattcgcgttctaagtcgtggcggcgttcttcatctagcaaatcccatttattgttcaccaaaaccagggctctacccgcagaaataacttgctcaataattctaatatcggcgctagctagttcttgcgaagcatcgagcaacaccatagccacatccgcttcctcgatggccgcctgggtacgcaaagaggcataaaagtcagcgccccgactttttagcatccggcggcgaatcccggcggtatcaacaaaggtccaaggcaccccggcaatctcgatcacctcatctaccggatcgcgagtagtacccgccaaatcatttaccactacccgctgcgaacctgccaaagcgttaagcagggatgatttgcccacgttcgggcgtccaatcagcgccacccgcccgggactcccctcaggaagcgccttcgaaaactgagatttttccggtagcaacgccactagtttgtccagtaaatcgccgctgccgagaccatgcaaggcagatagcgggaacggctcccctaaacctagggaccaaagggcggtggcgtccgcctcaccgcgtgaagaatcaactttattagcgaccaaaattaccggcttatcgcagcgttgcaggatacgggcaatctgcatatcagtttcggtggcacccacctgcgcatcggctacaaatagcaccacatcggccagatgaatcgaggcctcggcttgagcagctaccatctgatcaaggcctttgactcccagttcccaaccaccggtatctaacaactggaaatctgttcccgcccactgcgccgggtatcgcacccgatctcgggttactcccggctgatcttgtactacggccgcgcgccgacctaaaatccggttaaccagggttgacttaccaacattcggacgcccaataacggctacaaccgggagggcacctaagtcttggtgctgttcggcagggttttcagcatccaacaattcatagtcatcgtcttgtagctgaatttcactaaggatatccgccgaatcttcgggctttagatcttcactcacgccctcaagtttaggtgagagcagggggctttggcgaaagcttagccctgacgagcctggaaagcccgccctacaatcgcgactacggcttccatagtttcttgttcgtccaggtcggaggaatctagcagctcaactccgggagcgggagtagtgaagttgtttacctgcgagtccgcgaagtcacgctcggctaccgaatcgctgcctgcccccagctgccgggcgcggcgttgctcgcgcacctgtggggaggcggtcaacaagattttaacgtccgcatccggagccaccacggtggtgatgtcccgtccttcagccacaatcccccgtccagaggctttagcagcttcaataatctgacgctggcgggcaatcatctgctcgcgcacctcaggcaccgcgctgacccggctaactgtgcgggttacttcctcgccccgaagcaaacgggttacatcgcgcccctcgataaggatacgcggggcatgggcgactgcttctacctgcatgggtatcgagtaggccaacatagctagcgccgcggtgtcatttaggtctgtatgtttttgcagtgcataccaggttagggcgcgatacatggcgccggtatccaaaaagttggtacccagttccgccgcagataggcgggcaatagtggatttacctgccccgctggggccatcaatggcgattaccaggccagctcccagaatttgctgacctacgtattgtgaaccgtcacctgacatagcgtttacacccttccgaaaacgtcatttacggctgccaaaaagcgccttataccttcgataatatgctatttgttagctttttggacagcttccccattactatttagagatttcctgctaggcagacacgatttcccagccttttacctccagtttttctgccagcgaagccgcagagttgggttcaatcgctagccgcgccaccccaaaagctgccccgggcgagtgttctagctccaaatcctcgatattgataccggtatcgcccactgcttggaaaagccgccccaaggttcccgcctcatcaggtaccttaaccattacttcctggtagcgccgcggggctcccccgtgtttaccaggaatacgggccacccccaagttgccttgacgcatagccaaagttacggcccccactaaggagggtgaagggatagcagctcccggatgttcgagggcgcacaagacttgttgcatatcatcggcaaatcctcgcaacactttcgctatatgttcggcgttaccggcgataatagccgcccaaagggcaggatcagaagaagcaatccgggtggtatcccgcaagccctgaccagatagccctaaagattccggcagtgccttcgccaattgggccgccagcagggaagaaaccagttggggaacatgggacactaacgccaccgattggtcatgagtttctgcgtctagttgcagcggcatagaacccacatctaatgccaaagtacgcatggctaaaactgcactcgggtcggtttcttcgttgggaaccaccacccaggggcgagattcaaacaggtcttcgcgggcaaaggcagtgccagagcgttcccgccctgccatcgggtgagagcctatatagcgggaaaggtcggcacctgcctccgctacttcctctagaatcacgctttttaccgaggccacgtcagtaacgagggcggcagggaactcttttagggcagcaattacttgctccgcagccacgtcaggcggggttgccaccactaccagtgcggggtcggggcagccttcctcccacttttgccctgcgcccatatcgcaagccagagcactaactaccggataaatatctcgtaaaaatacttgcactcccagtttgcttaggcgcattccgagcgatgcccctagtaatccagcgccgataatcaacaccggtccggtagttcctacctgcgtcttttcctcagaaacttttgtgttctccatattttccagcctaaaggtctacgctcttcatcagtacgcttagctccggctttgaaaggcggcgcgtcgcccccaggggcaaagtccccagttttacggtaccgtgcgcaatcctggatagttccatcaccgaggctcctacttctgcaaacatccgcctcacaatccggttacgtcccagatgcagctcaatttccaccaaagttaatcccccgtggttacccttgatagaaacccggtcagcctgcgcaaacccgtcctccagcatgattccgtcccgcaactgttgcgcggtcttcccggtaaatttgccttttacagtcgccaaataggttttcggcacttcccaggagggatgggtgaggcggttggctagttcaccatcattggttagcagcaagagccccgaggtatccacgtctaacctgcccacatggaagaggcgttccggatagtcgttcaaaaattgggtgaggtcgttagcggctccccgcagggatgattccaccccggtgggtttatttagggcgatagtcacgcgggaatcatctagcatcactagctgtccatccacatgtagcattacctgttcgggattaaccttggtgcccaactcgcgcactactttcccattaactttcacccgcccagaaactatgagtttctcgcaggcacgccgagatgccaccccggcagccgctagcactttttgcagccgttcttcctcgccactttcgggagttgctgggggtttcgccaccggaacctgcgggtctttacgccgcggaggcatcggggctaagggaatatcctcttgggagcgtccttggcggtcagtgccctcatcactttcctgataggaactaagatcagtcaacttggcttctcctattgggttttatttcttaactgccctcatcctatcgcggtggcaaattattcttttagccgcgcctctagctcgtctaactcttcactacccggcagatggggagctagcggcggtagttcatccaggctggtcagtcccattcgctctagaaaactggtggtggtgccgtaaagaatcgcccccgactctgctttttcgacttccctaatcaaatcatgcgccaatagggtacgcaccaccccatcgacactcactcccctaatactggcaatcaccgagcgagaaaccggctggcggtaagcgattacggccagggtttctaaagccgggttagatagatgggaagtgcctggctgggtgaggaagctagaaacgatttcttcttgggcggcggctgaatagatccgccagcctcccgccacattgcgtaaaacaaatccgtgaggacgagaagtttcgcccgcatattcggcgcgcagttgctctaaagctgcctttacctgctggggtgtggtttgtaggtgcggtgccagttcctcggggcttaaaggctcgctggctacaatcaaaattgcctctagggcggccagtagctgttcatcagcggggttattcatctacggctccataatcatcgaaactgaagttattaatatctaggctttggctggtatctagggccacgtataactcggcgagggcgctttcctgggtaaaatctatgcagcggtgccggtaaagctccagtaaagctaaaaatcgggtcactttttcagttgcgttcttggcggagcgggtaagctccctaaaactagctttgccccggcgcgataattctttcaccacgatttgcgcctgttccgccagggaggcttgcggtaagtgcaggtgggaaagggatacttggggaggacgtcgggtaaaggcttcggaggcggcgcgggctaaatcttcgggggtgaaatcaactcgcagcggcggcaagaggcgagaaaacttagcgggcaagggaacttcccgcggatagtaggccccaccttccccgaggcgcaggcgtaaaaattctgcgacttccttataggcacggtattgcaaaagtcgagagaacagcaggtcacgtgcctctaaatattcgggatcgagttcttcagtttcttctccgggcagcagctgactggctttaatatttagtaaagtagcagcgatctctaggaactgggaggcttgcgataaatccggaaacgcctgcatgtaggcaataaaatcatcggttacctgcgccaacgccacctcggtaatatccagtttgttcttgataatcaaggtgagcagcaaatctagaggaccggaaaagacctctaattccagttcgaaggggggagctttttccgactcctttttcccggccagctcgggagaaaaaagcgctccttcctccccgcttgcctcctcgggcttaggtgaaactgttggcgagttaggcggcgtcaccacgggcaataacctcgcgcgccaactggcggtaagcagccgccccgggatgcgaagacgcaaaagtagtgatcggttcggtggctaccgaggcatccgggaactttactgtgcggcgtataaccgtcttatagacccgatctccgaaggcttcttttaagcgttccattacttctcgcgaatgcagggtgcgggtgtcgaccatagtcgccaaaatcccgtcgatttttagtttcgggttcagtcggtcacgcactttttcaatggtttcaaccagcagcgccaccccgcgcagagcgaaaaactcggtttccatcgggatcattaccccgtgggcagcggtcagggcgtttaccgtcagcaaccccagggacggctggcagtcaatcaaaatcacatcgtatttatcgctaaccgaatggagggcgcgggaaagcgccatttcccgggccacctcgttaaccatttgaatctcggcagccgaaagatcgatattggccggcaccagatccatgccttcaatcgcggtggggtgaatgatctgctctaaggtgaccttgcgatccagcaacacattgtagatagtggcatccaagtcgttgccatttacccccagcccggcggtggcggcgccttggggatcgaaatctacgatcagcactttgcgcccatactctgccagtgaggcggccaagttaatggtggtagttgtcttgccgaccccacctttttggttgcacatagcaataatccgcgcgggcccatgtgactccaagggcgcaggcgcagggaactccgcatctttcggggttggcgggggcatcaagccaggttgaatctcactcacccttataacgatatgacaacctgagaaaaaatgttaccaactggcgctcaacgagccttttatcccccgctcgataccgtgaaatgtacatctcgctactggcgaataaaaacaaaggcgacaataaccacgttggtagagacttaaatgcagtcacgaatcccaggtactctaactaacttgcgggaatgtggagctaagacctgattcgagcagtggcacacaatgaggacattattttttccgattagctgcggtgacgtcctgtgcggggaaaatattttatccgagtaggcgcggtgggcataaagtctgagaaaatacgtcagtattttccagactttgggcaggaggaaaaatatttttcccgcactacccagcaccccgcaaccgttaccaatcactaccgagcacgcggatgcgtctcttgatatacctcgcgcagcaaagtagccgttaccttggtatatatctgagtggtagttacattcacgtgtccgagcagctcttgcactaccctaacgtccgcgccgccctctaacatatgggtggcgaaggaatgccgcaggctgtggggggaaactgccgtttgtatcccagcgatctccgcggcctcgcgaataatattccaggtactttgccggcttaggcgccctccccgcaaattcaagaacagcgcggagctacctcggcctttttgcgcgagctgtgggcgggagcgcaccaggtaggcgtctaacgctttgaccgcgtattctcctagcggtactagccgctgcttattacctttcccagtcaccgtaaccaaagtgatggggttttcttccggatccgctgcctcactaccagctaagacccctaaatcatcaacgtctagggcgcatacttcactcaccctagctcccgaagcatacagggtttctagcagcgcccgcgagcgcaaagaggcggggtcttccccgctaaaggcttccagcagggcgcgggtttgggtgacagtgagcgctttggggagcggccgcgccaagcgggggttttctaggctttcggtggggtcgatgctgcttaagcgctcgtttaccgcaaagccgtggaatccgcgcagggaggccattagccgcgcaattgaagatgccgccagcgggtttttcccgtcttctccggcagcggcggcctgcaagaacgcccgcaaagtctccggggtaatttcggctaaagcatgaataccggcgcccgctagatattcgtggtaacgcgccaggtcgcgccggtaggaattgacagtgttattggatagtccgcgttcaatcgccaggtgatctagatacgccccgctcgcctgctcgatttcatccatgcatttagtctagagggcgcatccgcttttaccttgcctcccctgcgtcaaaagttattttccggcgcaacttcgctgccggggtaataatagaagcacggttgatttataggagtgatcttttatggctttattcgccgtcgaatatttttatgaccccgctgccgccgaaaaaatgaatgaggtgcgccctgaccaccgcgttcacctgcgcggtctgcacgctcaaggcatagtaaaactggtgggttcttgggttgatgatccccatccgggcgcgcttatcgcagtcgaagccgaatccgctgaggacgccctcaccgctttagctgaagatcccttcttcctggccggtttcatcaccgatcgcaaagtacaccagtggaatgtaatcatcggggaaatcgcctagttagagcccaatcccgcagcaacagagaatgaaaattgagcacttttcaagcatttcattgagcacttttcaagcaattcaatgtgcacttttcagaggtttattcttataaacgataaacggtcactgacaagatcaagctcatacagggtttttatgtgcatccaaaacaacgcatcacggcaatagcgctagacgttaaatttgaactcgaccacgtttcgcgcgagacgaacgtcatacatcgaggatgtgactaccaacggttgctcacatttggcgaggcgtgctacgaccgcgttagctttctagcgacatcacgcgagccgctaggaaggggatcaccccgagggtggatgggaacctgtgatgtcccaccacggtgtagcacaccgaacggcgagcagccggtagatcctccgacgaagtgaagctgcgtaacgccccggaacggcaggccgggcagcagaaggggctgggttcccgggtagcacccggggtaatgcgacgatgagcacggcgtaggccgcccagtgacaagccgggaaagcatccccctccgggtacttcgtcgtatctggagactcctcatgggaacctactcccctccgtccgagaggacgcactacctcacccttcaagaggccgctgccgaaggcttcggcgcgtactcgactctgtgcacatggatcgcccgggcaagctgcccgcctacaagaccggcaatcgcgtgaaggttcgccgcgatgatctcgaagcccttgctgttccggtgggaatcgattctgttgagcgacacgtcaaggcgcttgttaatgccgctcctcgcctgtccgacgagcatatcgctcgcctccgcttcgctctcggaggtggtcaacgatgagtttgatcgccttccaaaccatctctgatcagctccagaacaccgcttggcattcctctgaggagcttgttggtggcgttcctactgccgtgctctggaggcgcttagagcgccgccccttgtaggaagagatgcgatccgagctcatcgtcatcgacggtgaagagtacgagatcgcgaagttccccacggctccatggaacacggtcggtgagtatctcagcgcaaagaacaaggctcgctatgccgcgaactttcgtcccggaacgttcggtgcgaaccgtccgactggtgcccttcgcactgtggacgagtggaaacttttgcgagctcgtatcgaatcggcggtctcaagatccgctcggacggtcgtgtcgttttgcagcgcgtcgtcgctgcgcatcgtctcggacttgcctccgttccgatgctcgacgcaaagatctccgtgcgcgagaagcttgattggctttcctcgctcggattcggtgacttcactcgcgcgcagtgggaccacttgaccaaggccgaccgtctttcccgcgtcgggcgctcgcttgagggtgcggtatgggtcgagaccctcgacatcatcgagaacctgcccgccccatggtgaggcatttatatctgccctttactaacgccgggcgggcaccggcgttctcacgaaaggaaatgaatcatggcgaatctcgacaaggaaatcgcggacgctcgagctatctcgagcgatcgcgatttaattcaatccttaaaaaataactgctctaccagcgcaatcgctagtagagcagtcattttatgtcagtccctgagccctatttacagagctggatcgattcggtagtacacggcgttccaacgcagttgatcttcgaaacgacgaacagttgtttcttcatcgatgactgcgagttcaacttctgcaatcttggcaaaggcttcccacacatccataccaatttgagtggtcatcacggtgtggtgtgcagcgcctgctgccagccagcagtgtgttgaagtctggaaatcaggtgctggctgccatactgcgcgagcaactgggagcttaggaagatcttcattcggctcggtgacattcactttgttagcgacgaggcggaaacgttcgcgaacatcgctcattgccacaacaacgccttcgcgtggggttgcggtgaataccaaacggaccggatcttcacgatcgccaatgcccaatgggtgaatttctaggcgtggcttttcatcgcacagtgtggggcagacttcgagcatgtgtgcaccgagaatcttttcttcgccgcgaaccatgtggtagcagtaatcttccatcaaggatgccccaccttcgaggccatagcccatgacttttgccaagcgaacgagaatagctgtcttccagtcgccttcggcaccgaaaccgtaaccgtcagccatcaaacgctgaacagcaaggcctgggagctgcttgagcccgccaagatcttcgaatgtatcggtgaatgcgccagctttttcttcttcgaggaaggaacgcaaggcaatttcttgcttggctgcataacgcaaggaatcgtggcgttctccgcccttacgcagttcttctacgacgtcgtacttttcttcgtattcgttgacgagtgcatcaacttcgctgtcttcgacagattcgatgcgggcaacaagatcgttgacgccccaggtgttggtggagatgccgaaacgaacttcagcttctgttttatcgccttctgttacggcgacgttgcgcatgttgtccccaaagcggacaactcgcaggttctgtgcttcgttccatccggctgcagcacgtgcccatacgcctacttcgcgatggacttcttcatcggtgtagtgaccaacagcggtggtgcgtggaacgcccatgcgggtgaggatgtagccgaattcgcgatctccgtgagctgcctggttcaggttcatgaagtccatatccatggttgcccacggcatttcacgatcgatttgggtgtggaggtgaaggagtggcttgcgcattgcttctaggccacgtacccacatttttgcgggagagaaggtgtgcatccacgcaatcgttccgattacgttatcatcggcaccggcatcgaggaatgtgcgcaaaatagcatccgaggtggtgagaactggcttccacacgatcttgacaggaacttcgcctgaggcatcaattgccttggcaatttcctgggattgtgctgctacctgatccaatgtttctggtccgtagaggaactggcttcctgtgaggaaccagatttctttaccttcgaatgggtttttcatgggtgtactcctttgtttcatgaatatgtgtggttggtgtttttattgtccgtagacgttttggtaacggttgtagagtgaatcgattttttcttgaggaatcgggatgagttcaccaagctggctagcaatatggacagtgcgtgctacttcttcaaccatcgttgctgctttcacagctgcttccccatctttaccgatggtgaaaggtccatggttttgcatgagaacagctggggaacgatggcctttgagtgtttcgacgatgccgcggccgatcgaatcatcaccgatgacggcgaagggaccgataggcaccgggccgccgaattcatcggccatcatggtgagcacacaaggtacttcttcgcctcgggctgcccacgctgttgcgtaggtggagtgggtatgaaccacaccacccacttcgggcatattttcataaacataggcatgtgctgcggtatctgatgatgggcttctatccccatctatcagttcgcctttaatattgcagaccaccatggattccggggtgagttgatcgtagcgaacaccggaaggtttgatgacgaaaagatcatcatgtgagggttcatctcccacaacaacacgttgggacacattgcctgctgtccacaccacgagttcccagcggggaagttcagcgtgaagatcgcacacgatttttcgtgtttcagcaattttttcctgaatctgaggtgaatagttttctaaactcatcgtttttctccttattggctattcagatgattggctctacagatcacgtggacgaagcgcttcagttgcagcaggctgaatagccaaagctgcgcggtattcagctaagaaatcagcgaaaccttgcgcatcaaccgaggatggaacgatcgtggtgtttgctgcagtagcgaatacaacgtcgttcaaaaattctggcaaactcttgacggctggcccgtgctgtttttcttcacgataggcggtgtatgcagccaaaacagccattccccacgatccaccttccgaagctccatcgggcacggtgatcggtgtgtgagttgccgcggcaagcaatcgctgtgccaccttttctgttcggaacactcccccatgagcggaaagaatatcgagctgcaccttttcggattccaatacctcaacgccaatcgccagtgctgcgaatgtggaatacatttgtgctcgcataaagttttccaaattaagggttgcccaaggcgtgcgagtaatcaacgggcggccatccgtgagatgaacaacgggttcacctgccaaattgttgaaggcgagaactccgccagcatctggttcgccatcgagagcgctctccagcattgctttaaacacaaaatcggtggaggtatcgggagccccgaggcgcttacctacctgacggaagatttccacccagcgcgacatttcatcagcaccgttattgcagtgcaccatcgcaacaggcttaccatctggcgtggtgacaagatcgagttcaggatgaacgttcttcaaggggccttcaagaacagccatcaggaagatcgatgttcctacgctgacgtttcctgttcgaacgctcaccgcattggtggctaccatgcctgttccggcatcgccttcaggtggagcaaagagaaccccaggcttgagtttgccggaacggtccaggagctgcgctcctttttcagtgaggtgcccggcgctagaacctgcttggaggatagcgggcatgagatcttcaacattcgtatcctggccggacagagcgttgaaagcttgaatcatctctggttcgtaactggttccatcagcggtgatggggaacattccagaagcatcacccacgccgagtactttttcacccgtgagtttccaatggacgtaaccagctagtgtggtgaagaaaacgacgttgggtacgtgcttttctccatcaagtattgcttggtagtagtgcgcaatggaccagcgaagcggaatattgacgccgaatttttcggtcagttcttcagcggcggcgctggtggtggtatcgcgccatgttctgaacggcgtgagaagattgccttcgtgatcgaatgccatatatccatgcatcatggcagaaatgccgatgcttgaatatgtttcagggacgacgccgtgattatctttgcagttctccagcatagagacgtatgcggaagaaatgccttcccagatagcatcaagagaataactccaatggccgtcaatcatttggttttcccattcgtgcacaccggtagcgacaggttcccctgttagtgtaacgagacttgctttaatacgtgtggatccaaattcgatccctaaagcagtaccccccgagcgaatcacagatttgtgatcgggaagaagtggcatggtaactctccttcgagtaaaacttgcggtcgtttgttacgcccatttatgttagcgctaacattattgcatttcctagaataccggataagtgaaagttacacaaggggcaatttgcattgaatgacttttctcccttgttctataatttaaagccgatgtgggctgctgcggccgtctatgaaatacattcctatctttaggtaatcaggaagggaaaaatgggctctgtacaatccgtttccatggcgcaagtagctaaaatcgcaggcgtttcccaccagactgtctcccgcgtcgtcaataatttccccggagttaagccgcaaacacgcgaacgcgtagaggaagtgatccgccaaaccggatatgtccccaacaccactgcacgaactctggtcaccaagcgttcgcgcatgattggagtgatcgcggtagggtcattcctctatgggccaacgcaatcattttcatcaattgaacaatcagcgcgtgcccaggattacaccactcttctcgcaaccgtcacagaagaatctcgcagcgaattcttcggcgcagtaggtaatttcatgcagcgttcggttgatgcactcatcatcgttgcggcgtggcatttaaccacggaattcgccgctgaactcgaactctccatccccgttcttttggtcagttccccttcgccgctgagtgaaaacctcaatattttagggattgatcaagatggaggggctcggttggcgattcgtcaccttatccaactcgggcacagaaatatcgcttttctcaccggcccagataactggatggatgcacggcagcgccgggaagcagctacagatgaagcagagcgcaacaacctcaagttgattgaatttccaggagactggggcgcacaatcgggatatcaagcaggtatagcgcttgcctccatgcctaaggaaacccggccaacagcagtattttcagccaacgatcacatggctctcgggctttttgccgccttccataagtgcggaatctctgtcccttcagacatttctgtgatcggcttcgacaatgttccggaatccgaatactacagcccacccctatcaaccgtagaacaagatttcagttcattaggtcacaaggttttagccaatgcactacacctcattgaggaggaagaaactgatttcgcgcctattcctacacatttagtgattagagaatcaacttctcaaccgtggaaccacgagaggtaatttccccatcctttcatttaggtattgacaaacagatttccactcattaaagtcactattacaccccataatgttagcgctaacttttttaaaagtttcgcttcgccgaccaggcgaaataatcgtagtgatgcgatgaatgagaaacagagaggtttatttaaggagttcctatggcacaaactgtagatggccggaagaaaatttcggagaagttcatttatttcttcggtgcttttggcgggattttatttggttacgatatcggcgtcatgactggcgctctccccttcctccagcatgattggaatcttgaagggcacgcaacaaccatcggttggatcacctcgggcgttatgttcggcgctattttcggtggtgcaaccgccggtatgctttctgaccgtttaggtcgaaggaaaatgattcttgcctcggcagtcattttcgtcgtaggttctattgcttgcggtatcgttcccaataacggcaccggctggctcatcgctatgcgtattttcttaggtatagcggttggtgcagcttccgcactcgttcctgcatacatgtcagaaattgcacctgcacgcctgcgaggtaacctatccggcctgaatcagacgatgatcgtttcaggtatgttgatttcctacatcgtcgattacttactcaagggccttcctcaccagtacgcatggcgtttgatgctcgctgcagccgcaattcctgctctgattttgttcctcggtgttctccgcctacctgaatctcctcgtttccttattcatcatggaaatgttgaggaagcacgtcacgttctcagcatgatccgtcctgccgatcaggtagaagcagaaatcaatgaaatcaccactaccgcaagcgaagaagctgaaaatcaacgtaaagtcagttggggtaccctgttctcccctcgctaccgctacttggttatcgccggtattggcgtggccgcgttccagcagttccagggcgctaacgcgatcttctactacatcccactgatcgttgaaaaagcaacaggccaagccgccggtgaagcgctgatgtggccgattatccagggcgtgattctggttctcggttcactcttgttcatcgctattgcagaaaagttcaaccgcaagactctcatcatgatgggtggaacggtgatggctctgtccttcatcttgcccgccgtgattaacatggtgatgccaaatgctcacccgatgatgatcgtcgtgttcttgagcctttatgttgccttctactccttcacctgggcaccgttaacctgggttattgttggagaaatcttcccacttgctattcgtggccgcgcttcaggaattgcttcctccttcaactggatcggatctttcctcgtgggcctcgtgttcccgatcatgacagcgaagatgtcccaagaactcgtattcttcatcttcggcgtgatttgtgtactcggcgttctcttcgtcaagttcatggttcctgaaacccgtggacacagcctcgaagatatcgaagaggcagctgttcgtcgttccctaggaaagtagttattcttcttagacgaacgtcaaacaatattttccggtggcaccacactttccacatcaggtgccaccggatttttttctctatgttatggacgacgaaggattgccaccccctatttcccgagtttgctatagggcgcactcacagcgattttcacagcgggttcgagtgagctttccggatctgcatagaacaacggtgaatggttggcggggagaactttgccgtacatctccatttgtttcggacctgctcctccgtagagccagaagacgttttttgccccgagttcattgccccaatccgtaaaatcttccgagaaactaaagttttcttggacaatttgggctgattccacattctcagacagctacttgcgcaaggcttctgtttcatctggatcattgatggtgggaccaacatctgagttgtttaacagttggttcgggagcccctgacgattgcgcttcagaatgaacgatgcgttcaatcccctctttaataatggcgcgtgtttcttcatcgcggaaacgtgtgttgataagaaggcgggcgctatccggaatgatgttatcaattgttcccgaattaaattcaccgaccgaaacaaccgcgatggtatctggattagtcattcgtgaagcaattgtttgcaagcgcatcactacagcagctcccacaacaataggatccaccgctgtatggggttgggaaccgtgcccgcccttgccttgcagcaacacatcaaaaccttcacttccaagaagagcgccacctggatacagactcacccaccctgcagggcgaggtcgtagccgacaacccgatccacgaagtcataggtgcttcgcagagagtcaccctgccctaccgtgcccatgagcaccgaccagttgcccgtggtataacgagcatgcacgacttcgttgatctgtgtcgacatgatagtcaagaccggcaggaaaccatggccgagcgcctgggctgcgttggcaagatccgcattctgtcgcttgctatcggacgacttgtaaccttggcgcacctcgaacactgcacccttcagaggcgcagtaatgttcaaacgagtacgttgcgcgtcgatccaccccttcattcggtctcgtgcagtcgagtcgtcgacatcttcaagcgaaacacgaccgtcgagtgaaagcacccgcgccttcgcacccctaggcgcgccctcgacatcaggttccggaagaatctcatatgaccacgtgacctcatctgcatcaagagagagctgatcacgtagaacctgacgaaaaagacgttcactcccaataccaagctggcggtagatcgaggtcataccaccggcagccttgtgggcggcaaacatgagtggcgagtccagacccatccagtggtaaagagggtctgcaccatacagcccggtgaatgcttctagatcaacctcgcccgagcctcccatcttcgggaggtagtcagccgccttccgcaacggagcgaggatgatctcaacgtactgatcatcacgacaagatcaagctcacagcgggtttgtaggtgtatccaaaacaacgcatcatggtaataacgctagacgttaaatttgaactccactacgtcaccgtcttgcatcacgtagtctttaccttcttggcgcagctttccggcctcgcgggcagcgtgaatcgaacctaattccactaactcgtcaaacccaataatttcggctttgatgaatccgcgttcgaaatcgctgtgtattaccccggccgcctggggtgcggtccagcctttatgaatcgtccaggcgcgcgcttctttttccccagcagtcaggtaagtttgcagccctaaagtatcaaaacctacccgcgccaactggtcgaggccggactctttctgcccggattcttccagcatttcccgggaatcctcttcatctagttccactagatctgcttcgaactgggcatctaagaaaatcgcttttgcgggcgccactagctcctctagttcgcgttggcgctctttatccaaaacttgctcggcatccagattgaacacatatataaacggcttcgcggtcatcaactggaactctttaagcagctgtttgtctagctctccgtgcgcagataaaagctcttcgtcctctaaaaccgcctgggctttcttgacctccgccagcacttctggcggagttttgcgcccacgaacttccttttctaggcgcgggacggctttttctaaagtctgcaggtcagccagaatcagctcggtagaaatggtttcaatatcggaggcgggatcgatcttgccatccacatgcaccacatccggatcactaaacactcgggtgacttggcagatggcatcggcttcccgaatattggccaggaactggttgccaagcccttccccctgggaggcgcctttcacgattcccgcaatgtccacgaaagaaaccgtggcgggcaagattttcgccgagttaaatatctccgccagtttcttcaggcgcggatccggtagcggtaccactcccacgttggggtcgatagtcgcgaacggataattcgctgctagcacggttgcgcgggtgagcgcattgaacaaagttgatttaccgacattaggtaatcctgcaatcccaattgttaaagccacgtctctaccctatcgaagggcgaaagcggcgggaaatctagcaggaaacgctaaccgcccccggtaatggtgtgcacaatctccgtaagcgaggtatagaactccccgaagcggttagcaggaagcatcaccgccacgatcactaacagcatagctgctatcgatccagctagggcgcgaaaataggccgcgcgactagccactttcatcactttcggtactcggcgaatcagcgccatcaaagccaagatggccaccaatcccgcaagcgtaatcgttccccaccccatcagggaaaacaacgcgggtttcccttcggttaagacagaatcggcgcccttaacttgggcagctttaggcgcatcgctacttcgtacctgctcccaccaacggtaaagctccggcatttgctgtcgccaggtagcccagttgtgtccgccctccgccgcgatatgtagctgcactcggtcgcccggcttaaacgccgcctgcgataaagtcttcgctaaaccccgggaatctttatctagcctcgccccagaaacatacatatttactggccaggggcgcttcttctccgctaaaaccgaaagggtgttgtcgtgaaaaccggcgctaccgcttcctccccaagaccccacaatcggttggtcgtaaccggagagtaccgcgctagttccaaaaacatcaccataaagaatccccagacgtcccgcacaataggcaccggaagagtttccggcgatcatccagtcttttcgtttatcggatacgttcgggaaactggagcgcaccattttaggaatatcaaaactgagccaagtggcagtttgcgccccattcttcacatctgcacaggttgggggtttaaggtcaacgtttccttctggaataactacgatagtgggggcaatttcgccactatcaatcgccttttgcaggttgtgagaaaaatcgagggcgagggcgaccgataccggagagccgggatagccgtggataaactctaaaacgttataggtggtggttttatcgcccggatcatatccctgcggggtccacacaatcacctgttcttttaccccagatttcggcccggaaaacaccgttagctgccggcctttcgacaagggtttaaaacttggggaccattcctcttgccccggcagggctggtgcggttaagggattcattttttccaaggcagagggtacgcgcttggctagcagccttccccgctgggtatcactgattttcacttcagtgtcttgctgactgctgaccatctgccatagctgactgggagtagacacgtattgcatcggcaagttaaccagcaacccgactgccactacctgaatgatggctactaataaaacaatcaaaaccgaacgcaggtagcgcccgggtttgcgaatcatctgtggcaacgctagcagcaaacctatagctgccaggcaaaagatagtaacgaagggtatagaggtcagcatagttaccgctaacaggtatgccccgggtcattggtgcgtcgccgattatcggtggtgatcatcccggcttctttaagttctttacgtagcggcaagggcagcgcaaaagttacggtttcctgggcggtttccacttcttctacttcagcaaaaccccattgtgccagctgcgctaaaacctcttttaccagcacttctggcacggaggctccggaggttagccccacggtttgaacgccgtcaaaccagtcagcttccatctctaaggcttgatcgatgcgataggcgcgctcggctccacctacttctgccacttctttcaggcgcaccgagttagaggaatttgcagaccccactaccactactacttcggcctgttccgcaatcttttttactgccccctgccggttctgggtagcaaagcaaatatcttcgctggggggatcactcaattcggggaatcgttcccgcagtttctctacggtttccctggtttcatccaggctcaaagtagtttgcgatagccacaccactttttcccggtcgcgcacctgcacttggttaacgctttcggggtcccccactacctgaatatggtcgggagcttccccttgagtgccttctacctcctcgtgtccttcgtgccctaccagcacaatgtcatagtcggctttggcgaaacgtagggcttcgcggtgaactttagtcaccaaggggcaggtggcatccacggtttttaatcccctccgtttagcctcctcccgcaccgccggggatactccgtgggcggaaaacactacccgtgccccggtggggacttcatcgagttcggttacaaagcgcgcgcccttagcgcttaactgttcgactacaaacttgttatgcacaatctctttacgcacgtaaaccggggctccatagagcgctaaggctttttcgactacgtccaccgcacgatctactcccgcacaatatccgcgcggggatgccaagagtaccttctttgttgccacgcccctatcctactcaggtatttttcttcccgccgaatgggtgactacttataagtacctgtgggtacaatgaagcggtgcgcacaaatccggattttcccaagcaacagctggctcccacggccgcccaaaccactcgggagaacccgtggccactgtctttgctgaccgctaatatcaagaaatacgttaaccggatgtcgccactgtgggtgagcgggcaagtcgtggaatataagcagcgtccgggtgcgcgcatggctttcttcgtgttgcgggatgctaaccaaagcacttcgatgacggtgaagtgttggcctacagtcctcgactcggtgggagctaacttttccgagggcgcgcaagtagttgtctacgcgaaaccggatttttatgagggttcgggttctctttcccttatggcgaaagaagttcacgcggtcggggtgggtaacctgcttgcccagattgaggcactccgcaagaaactagctgccgagggcttatttgcgcaggaaaacaagcagccgctaccggtgattccccgcaaaatcgggttgattgtagggcgcaacgcgaaagccaaacaggacgtgatggtgaatgccttggcgcgctggccgctagccgagtttgaggtgcgggaagtggcggtacaaggccccacttgcgctgcggaagtaacccgggcactggccgaactggacagaatcccccaagtagaggtgattgtaatttcccgtggcggcggcgcggtcgaggatctgctgccattttctgaagaatccttagtgcgggcggcggctcaggcacgtacccctctagtttccgctattggtcatgaggaggacgcgccgctactggatttcgtggctgactatcgggcatctacccccacagatgcggcgcgaaagattgttcctgatttacaggaggaatccctgggggttgagggagcccgctcccgtttgcgcacccagatactcgccctcttagatcaacacttagggcagttagcccagttgcgcgcgcgcccagttatggcggatccttccgcagttattgctgctcaggaacattctttggcaatagacagtcaacggctgcgttttcgttttgaaactcagttagaaaatcaggtaacttccctgcgcggatggcgagatgctttgaaagcctattctccccaagggattttggagcgcggctacagtattttgcgctcgcctgctggcggggtcatcaaatcggtatcgcaggtaaataaaggcgatctactagaggcgattttcgctgatggaacggcagtaaccaaggtttttggtacgaatcagaaaaatagttcaggagacagtgatgagtgaagaaaaaactgaagttcccgtaggggaactttcctatgagcaggcgcgcgaacagttggtggccgcgatcgctcagctggagtccggcaagctaggcctggaggaatctttaaaggtgtgggagcgcggggaacagctcgccaaccattgccaatccttcttagatgaggccaagcagcgtttggaacaggtcaagaaatcggaataggtcatggcaaccagcgaagataagccggctcaaaaaaccgagggcaagaaacaggggccagcaagcgcgagtgagggcgccctagtggctactaaagaccaagaggctagcgcgggggcaggatcggaaaatgacgaaagcctgccttttgagttagggcaaaagctgggctatcacaaatctgctcccctcaccctttaccagattatcgactacgtttttgtggtgatagcggcggttttaaccgtgcgtctggcttggatcctcctcaaacatggtttccagctttccctggttatcctggtctatttaacttttttctgggtgcttttggcttatctggcgctgccacgtctacatcaaataatgtcttcgctctacgttccggactattacattgggcgttctaaaaccggggatgggattctgggggatcctattaacctagcttggctgggagaagaggaggatattcacctggcgatgcaggcagcgggctggacgatggccgacgagattacgctttcttcttcttggaagattattttcgccagtgtttttaagcgttcctacccggcggctccagtttccccgctctatcttttcgggaagaaacaagattttgcctatcaacaagaggtagacggcaatcccagtcagcgacatcatgtgcgtttttggagggttccggaaggttggaaactgccggggggattccaagcggattggctggcagcggcaactttcgacaaggcggtcggtctgtcgttgttcactttgcaaatcacccacaagattgacgagaacatcgatattgaacgtgaccatgtagtagataccgtccgggcggcctgtaccagcgtagaagtagacgtgattcccgatgctaccagcgcgtatcactcgcgcaacggcggaggtgaccgggtacaaaccgatggaagcctgccggtgattgaagccaatctggtaagtgaagaacatctgaatcggcgcgaaaacttggctttgcaacataagggttatctgcgttcttcccgcgaacaggcagagaagaaaaataagcgccggctgctgcgagatcgcgaagtaccagccacttctttggcctgtgggattactttgacggttctgcacgccttggaactggcggcgattggctatatcctcgctaccaacccaaaatatgcagatgaattggggttttctttttaccagactaacctggcaggctggggttttatggcgttagcggtcttacttaccgtcttaatcgtgggaactttatgtcaccaaagatggatgcgtctgggactgctcttggtgcttaccgtaacggtgatcgtgcggatgatggagtccttgggaatcgaaggcgcctccggaactcccctatggatcacttccactaccttgtcggtgctggcaatcttagcgattacttctccgggcgctcggcgttgggtgaaggaggagtagctttaacccgcccttcacttccgaaagtttcagtttctccggattgcctctggctactatcacctctggttactcaaaaggggtaacttccagcagctttacctttatgtttttgccgttgggagcctggtaatcaacagtatcccccactttatgtcccataattgcttgccccagtggagcatccggggaataaacatcgatatccacatcggggctggcttcccgggaccccatcaggaatttaacttcccgccggcctaaggttgcttttactaccatccccggttctacaatcccgtcatcggcgggaggctcgccaacctcggcgttctctataatttcttttagctgcagaatccgagtttcattccaggactgttgttcgcgcgccgcatggtaaccgccgttttccttcaagtcgccctcttgccgggcctcatcgattcgacgggcaatcgccggacgctctacttcttggagatggcgtagctcttcttttagacggtcatatgattcctgggtcatccaggtcttctctgccatcgtgttctcctcagctaataaataaaagactgaccacgccgggcgcggtcagtaaacagcaggtatcagtgtaacaaattgctgctgaagttgctattacaaaaagctaataacttatttccaatataagtgccggtcaggatagcacagcgaaataggcggcgatgcagatacaggtccagcccgccaccgtgccggcatggaaaatctcgtgatacccaaagtagcgggcgcgtctacctggccagcggatcccgtaaaacacggcgcctagcgagtagctgagtccccccgccactagcagccaaataagcactaatcccccggcttggcgtagcggctccatatatgccagtgccacccagcccagcaaaatatagatgggcacatacaaccagcggggagcccccggccaaaatatagaaagcaagatgcccgccaaggctcccagccataccagcagcaaaagatttctgacctgcggataaggtagcaacgaaaccgctatgggagtataagatcccgcaattaaaaggaagatattgcagtgatcaagacggcgcattacgctgtgcgcccgtttgccccagtcgatgcgatggtagagcgccgaaactccgaaaagtagcagcgaacaaaccaggtaaacggcacacgcccagcgtttcgcggtggtgtctgctagacaaatcaacacaatcgaggcagctaaggacagcggggtggttatggtatgaatccagccccgcaacttgggtttcggcaaggtattgaaagaatcttttatccgcgttctcacctgcacgtatcgtccgtcatcaggtgtcatccgtgctcctcagttcgaatagaaacctgccctagtccaaaagccaaggtaggatagcttgttcgcgaccaacgctaatgcaccctataaatgctgtcaactgctcgccggagggggtaaaatccaactattacccctaaaggagcaagattgacccaccttactgacctggtatatcgcctctatgcccgcaacctagaaaaggcactacccaccgaatctttgccgcgccacgtgggagtaattttagatggaaaccggcgctgggctcatcaagtgggtgcggagtcggaaacgggccataaggtaggtgccgataaggcactggaatttttgggttggagcgaagaggtcggaattccagtagtgactctctggatgctgtctaccgacaatctgcgccgctccggtgaggaactcacgaaactttttgacattatttgcggagtagtagagcaaatagcttctttagggcgctggcacctccgtttactcggtaacctttccctgctgccggccccggtacaagatcgcctgcgggaggcagtggcacattcttgtcaggactctcccctaaccgtaaatatcgctgtcggctatggcgggcgcgaagaaattaccgaggccgtgcgggagttgctcctggaaaaggccaacgagggagcggatttaagtgccgtggccaaagaactttccgtggacgaaataacttcccacgtctatactgcgggccaacccgacccggatctagttatccgtacctcgggtgaacagcgcctatcgggattcctaatgtggcaatctacccattcggaatactacttttgtgaagccttttggccggacttccgtaagattgatttctaccgcgccctgcgcgactttgctctccgtgagcgtcgcatgggcaagtaaaaactattcctcttcgtcctcagaattgtctgcttttgagggcagatcctggtcttcttgccgggcggcgtgttcagcctccacaactttctgaatcttggtcgttgcccctacctcgaaatcggttttggcatccgctggcacaatctgattcggatctgcggccgcaaactcggaaagagtatcttgaatctccagctgcactttctctgcctgttccgcatgttcacgaggggtacgccgctccccgtcttcttcagcggcggctttggcttcccgcgcctctgacaggttctgttcgctggggcgagctgcctccgcgagttccttatcgagggatccaggaggaccgccggggcgatctttttggtaacaaagacgaataaagctgtcataaccccgcaggtagagcactgtggtgtttacgaaagccaaaatcggaaccgcgaaaatcgcgcctacgattcccatcgaggcaccgccaccggctactgccagcaatactgccaccggatgcaagctaaccgcattagacattaatgctggctgcagcaagttggattccagctgctgaaccaccaaaataataattagcatcacgatcgccgtggtgaatcccttatctaccaaggcgatagctactgccatcatccccgaaagaatcgcacccagaatcggcacgaaggccgccaggaacaccaggattgccagcgggatcgctaagggaaccccaatcaggtaggcacctccaccaatacccaccgcgtcaatcgccgcgactaggcattgggtgcgggtataggcgccgagagtaacccagccgcgaataaccgcctcgtttagcgggtggcgcgccgaacgcggagtcaaccgcaagaaccactgccacagcttacgcccatcttttaagaagaagaacaaacagaacaaggcagtcagcgccccggtgaaagccgaggtcaccgccgacatggttcccagggcattcgatgctagccaagacgcattctggcgtgcataattttggatttggtcttgggcttgcgcccacagcttggaggcggtctcggtgtccatctccaacggcccggtggccaaccagtgaattccctcgtctacgccagctttagtgcgcccaatcaaattgggaagttcggtagccaactgggtggtagccaccgagatcatggctaccactatccccaccccgataatcaaagtgacggcggcggccagtgtccgaggcaaatgcagtttcacgtataaaagtcgcagtgcgggttctaaaagcaccgataataacagtgccaccgctaccggaatcacgattacctggaatttactggcgacataaaggaagccggcaaaagccactgccaccaccagtagccgccacgaccaatcagccgctacccgcaaggtcagcggcaccgtgtctttttgcgaggcatcttccctatttggctttatatccgggaggtcttgagtatacgagcctgcgtcccgaactgccggaacaggtgtttttctctgcctatgcagtgcgtcaagtagacgccgaaatgcttgcgcgagccagtcaagacgagaattcatagcttaaccctagcagcgccccgcaactctcttgcaaaccactcgctaagacagtgacgctttttactttcactaatgcggatagtctcaaaaccccaccggttagcgagtcatccgggaaattgtctcccccgattcctcctcgatcaggctcagtccgtctaaggtaaaaccattgacccgcaaaaaacggcgttttacttggtcggagcgaagcacccaggcttgggcgggggtgtcgggatctagaacatagtccaggaggcgttgggcgagttcctgggtatagaactggcggataatcccaaagaacgcaatgtcgagggcgcgaggagccggccctagttggtggtcattgtcaggagacgcggttacgtaggccatccccactacctgccttccccgggaagcaaaggcgattttcctgcccttcgtctgcaggatttgctggtgccaatactcaaggagggcttcttcggagtgcttttcccaatagctttgaggcacctggctaggaatagtttcagttaatatccggcggtgcgccatggctgcgccggcagcatcaaccaaggtcggggttcttacaatcaccggcacagctaggttccttcctaaaaaatacttccctaaaaacacttcggggcgactacagcttatagtagtcgccccgaagcaaagtttgctatttagttatctgcttagttatctcgaagaatcgcgatgattcgcagaatctcgatgtagagccaaaccacagtcaccatgattcccagggcgcagctccaggccatatctttgtcagcccccaggcgcactccctcacgaaccatatcgaaatcagagattagtgacattgccccgaagattaccgcaaataagcctactagtagtcccaagggcaaaccgaagagggttatttgatccatattgccgacagcgctggagggagtaaccatcgccagaaccatcgccaaaaggcggtaaacaacaatcgatactatgcccagcaacatgatcttcatgaacttggagttcacccgcaccagcccggatttgaacagcactaggcaggtaacgaataccgctgctgttccaatcagcgcctggattacaatcccggggtaagtgtattcaaagaatgccgaaataccgccgataaacagcccctcgaagaaggaataacccaaggtaatcaccgctgagggctttctgcggaaggaatgcaccagtaccagagcaaaagctattagagcggaaaccgaggaaatggtgagcatagttcccacgttcgccgctaggtcgcttactccccaaaaccatagtgcggctgccgccaggatcattaccccgaagctcaaaccggtacgtaccagcacatcatctaaggtcatcggacgggaggtgctttggggcacccccagttgctgaccttgatcgaaggtggtttgtccaggattataggtgctttgtccgggaacgccaggggtagctgactgcgggtaaaccggattagccgcccggggatcattccctacctgataaccaggcatttctggatacccagccggggtgcgacgcatctgctcgcctacttgattcataaccggatttgccatctggatctctctttctttagttaccagccacttccgttttgcaactttacttgtcgccctccgacaatcgccagagctaaaagcagcgcttctaatcaaattaatagctaaagtttcttaaaggtttctgagtgtgttccggaaaaataatggatggtacccccggtcggactcgaaccgacactggactgattttaagtcagctgcctctaccgattgggctacgggggcttaccggggcttttaagtgcccttcgggtgctttaacgcaccaaccaagttttgttttatcaaaagcaggtgtcctttgtaaaacgccacttcatattaaaccttagcgtttcgcgaaagtcgaaacaaagaagggttagcataggggcatgcaggacaaacatgatgccgagaacaatcattctccaaagcaagataataaagacgctgtccactacttccccctagaaaaagaggtcgaagaactggtaactcccccggattaccaggatttggcgattccttctccgaaggattacgacgaggaatcccctcacggggtctttacctccataaaacgaattttagccaacgacattgtggcgggcatgattttggtctcggccgccattttggcgctaattttagcgaatgcgccctccccggtgcgcgaaggctatatggcgctgtctaacttcgagttcggcccgcattccctagggctacatttagcggtacacgagtgggcgcaagacggaatcctgactctgttcttctttgccgtaggtctggaattaaaacaagagttcgcgataggttcgctgcacaatatcaaagtggcggcgatgccgattattgccgccgttttcgggatggccggcccggcctgtgtctatctagtaggcaccgcaatttcaggtgataatgcctggcacggctgggcgatccccaccgctaccgatattgcctttgcggttgctattttacagatctttggacgcggactgcccttagctgcccggactttcctgctgaccctggcggtcgccgatgacttgggcgggattttagtgatcgccatcttctacgccacgggaatgaagattgtttccctactgctggcattcgtctgcgccgcagttttcggtttcttagcccaaaaacggtggggccgctggtggattctagttcccttagggattctaacctggtatttcatgcacgactcgggagtccacgctactatctctggagtgctgctggggatgacggttcccgccaaacagatcgctggcgaaaccgaacccgaaaccgaacgtcttactgaagcagtcaacccctttagtgccgggttggcagtgcctatcttcgctttcttcgctgccggggtaaacgtggtggatgtagcgggcgggccgctccacgtaatcactcacccaattgcgctttcagtaatggtggcaatgccaatcggcaaggtcatcggaatcttcggttctgtagccatctttactaagctgacccctctcaccttaggcaaaggcgtggggctgcgggatgtacttccagtttcgctaaccgccggtatcggcttcaccgtggcattgctaatttcccacttggcctttagaggggacgcagatctgacccatgccggctctctaggggtgctgatgggaaccttcgcttcggtaatcctggcagctattgctctacaaatccgggtgcggcatctaaaggccgagggcaaactccacgactaaaaccacagcactccctagctatcttccctcagcaggtggttagggaggttatcggggtggtttcgccccccctcggctctagttttcgaggacgcgcgcttgctccagcagagcctcaaagtccggatcggtctgctcggcagcctctaggtagcggctgggcagaagcacccggttgtatcccaaggatgctgcctgttcgaagaaccctgccgacattttgcgcggggctttcagcaaaccggcgttactggcgcctgcctccaggagcccttcccgcagatgcaaagctgctagagcttcatgtggcttttgataggccagcgccacttttagctgctgtcccacctcaggaagagacaccaaatcgacgatccgttcaaacccgaaactgaatccgactgcgggaacatcgcgccctagccagcgccctactaccccgtcatagcgtccgcccccacaaatcgaggagccggaggccgtgtgggaaacttcgaaaatcggtccggtgtaataccccatgccccgcaccaaagtgggagtgaaagagatcttgatatccggagcaatctcccgcacctgggaggcaatggctcccaggtcaaagaggggcagctcggtgttaagggaaggcacctgcacagtttcaactgcgctgtccagttccagcgcggcgatactgcctactgcctctactagggctttcgcttgggagtcagcggctatttcctgcccgactagctctttgataactccctcttccccaattttttccagcttatcgagggtaatgaaggcgctatcgtgtttttcttctgcgaccccggctgctttcatgagctctcgcaggaaacgacgatcattaagcaggatcgtggaatctttatctagccccagtttgccgatcgcgttccacatggtcacgataatttcgacttctgcgctgaaggaggcttcccccaatatatcgatatctacctggttaaattggcggaaacgccccttttggggccgctcagcacgccacactggcccggtctggaaggcgcgaaacacgttcggcagctccgcttggtggctggcgaagtagcgggtcaagggaagggtcaagtcatagcgtagccctaggtctacagcctccgcaggcaggatgcctgtttgcggatctagtccgcgccgcatcacctggaaaatcattttctcgttttcgccaccttgcccagattgcagccgcgcgatcggctccagggctggggtttctatctccataaaccccagggaagtgtaggtttcgcgcaggacgctaaggacgcgttcacgccaagttttttcggtgggtaaaaagtctcgcattccgcgagtagcaacaatttttccagacatggctatcactttagcattggcgaaagtttcgactttgggactaaataaaaacccagatccgagaaatatagcagaaaaataggattcaaaagaaaagtaccagtggtacccccaacgggattcgaacccgtgtctacgccgtgagagggcggtgtcctaggcctctagactatgggggcctgaaacaagaaccagcaggttcccattttcgctggggtaccaggacttgaacctagaatggctgaaccagaatcagctgtgttaccgattacaccataccccaagggctgctaacctcagcttgcgctgggctgcagtcatctactctaacgcaggcggttagggtgcttcaaataaattccttgtgtgactaatcacctgagattatgcctgttccaggtggttttgtagcttacgcaggcggttgatgctggcctctttacctaaaatcccgatggagtcaaacaccgggatcgatacgttagatccagtgatcgccatgaatagcggctggaaagccactcggggtttgagccccatttcttccaccattaccttgctcatagcggcttttactgcctccggatcaccaatggtgccggtctcccctacttccccttctggcagaccgtctaccactttagccgcggcctccagcacctgaggagcattatctttgagtttgcgcagcggtttttcttgatattccacctggtcatcagcaataaataggaatcccagcaggctcttagcttgagaaagtacctgcatccggctctgggcaagcggagcggccgcctccaaaagctgtttttctttatcggttaaatccgatagcttctcggcactcacgaatccgcccgcgtgcaggtaaggaacaatccgctcagtgaaatcgccagtttccaacatccgaatatggtcagcgttaatcgccaaggccttcttagagtcaaaacgcgccggattaggattcacatcctcaatatcgaaagccgcaatcatttcttctttgctaaacacatccctatcggcagataaagcccaacctagcagggctaaatagttcactagcccttcgggaatcatcccgttttcccggtgcaaaagcagatttgattccgggtcacgcttggaaagcttcttattgccctcccccattacatagggcagatgcgcgaactcgggtacccgatccgcaatccccaactcgatgagggcgcggtaaagcacaatttggcggggggtggatgaaagtaggtcttccccgcgcagcacgtgcgtgatatgcatcagcgcgtcatctaccgggtttaccaaggtatagagaggatcgccgccgccgcgcacaatcacatagtcaggaactgaaccggcctggaaagtgatgtctccgcgcaccaagtcatggaaagtaatatcttcatcaggcatccgcatccgcagcactggctggcggccttcagcgcggaaagcagcgatctgttcttccgtcaagttgcggtcatatccgtcatatcccagatgcggattgcgaccggcagctttatggcgggcagcgatttcttcgggggtggaataggattcgtaggcgaatcccccggcgagcagcttatctgccacctctttataaatatccatacgttcgctttggcgatagggaccgtaggggccgcccttatcgacgccctcgtcccaatctagtcccagccagcgtagagactctaggatttgctcaaaggattcttccgagtcgcgtttggcatcggtgtcctcgatccggaaaacaaaagttcccccagtatggcgcgcatatgcccagttaaacaggcaggtacgcaccattcccacatgcggggtgccggtgggtgaagggcaaaaccgcacccgaatcggggaagtagcatccggattcatacctaaaatctccttgcgtaaaatcatcagttccccttgattctacttcgctccccgcctgattctcgaacctggggattgtcacggctaacctggcgccccgcctatacttttcccgcagtctctttagacctcatttacccgcgccttgactggtctgggggcgtagggtggaggcatgcaagattttgatcgtttatccctgcaagaactacgacgacgaggttctttaaaatggacagggaagacgttcgagggtgagcctttatggggagcctgggttgcagaaatggattttggaaccgcgcccgcggttgcacgctgtctgcaccgcgctatcgatgatggtttctttggttatatgccgcctgacctggtcaaagacctccagcaagagacacgaaggtttctagctgattcctatggctggcaggtgagcgccgaagatgtttttatctcctccgatgtgctttcgattctgcgcgctcaaatccaactgaccactaaagccggacaggcggtggtggtacccactccggcatatatgccgtttttaactatccccgcgcagcagagacgagatttaatcgaggttaaaagtcgctatcagcagggccgctgggagctagattttgaggcactcgaaagcgccctcagtcaagaaaaagctaagctgctgatactttgcaacccttggaacccgaccgggcgcgtcctgagcgaagcagagctgagaaaagtgggcgaactggcactggcccatcaagtaacagtatttgccgatgaaatccatgcacccctggtgctgaaagataaagctcaccatattccttttgccagcctagatcctgctttcacccagattacggttacagctcatgcggcctctaagggctggaacctggcgggacttcattgcgcgcaaatgattttgccgccctcaccgctacgtgatctttttgaacagtcaggggtgactacccaactagcgatgggcgcgactccgctgggagctttggccgctcgcgccgcctaccaagagggaggcgcttggctgcaagaaatcaaaggctatattcgcgaaaatctagctcgctcccgggatttggcgctacagattgccccccggctggaaatcccggaagtggagggaacctacctatcactatgggacgcgcgtagctattgcgaaaatccggtcaagatcgcggaggagagagcccgcgtgggggtaaatgggggcgagattctgggtaccggctaccccggtctgttgcgacttaacgctgctactcctcgctacctgttcctggagatgacccggcggctagctagtgcgctacgcgaaacagaaaacgattagtcgcgctgcttgccggaggcgttaacggtctagcggttcgcgctgaccaccatattttccatctgccccaccccggtgatggcgctttctaggcgcgcaccggggcttagaggttgcggcagctcgattcctcctacgatcaccacgtccccgggcagcaaagtcatcatggaactgaccttcgcgaaagcttcggcggctgttagcggcaagtcagcactgttagcggaggcaacctcttgcccggaaacgctggcgctaatggtgaggctatctggatcaaaatcggggtcaaccacaatccagggccccactactgcggaagtatcccaagcctttgcctgagcgaaactgatttcttcgctgccgctcgcgcaatctaccccaatagtccacccggcgattaccttccccacctgctccggagtcaagtttttacaaatagttttagcgaccgccgctagtcctacgaatacgcgcgcctcctcgccgccccaagtaggaatcgctatgggatcatccgggccaatcaccgcggtattgggtttgatcgctacctgcggccactgctcggaacccgccgtcttacccgcgagattcgcgcagcagctaactgctttcgagcgaggaataaccggagacagcagccgcgcctcctctaagttatagagctgtccggagggttccgccttttggaatagggggtcacctttgagggctactatccgttcacttccgtcctctaaagctccgtaaatagggtggtcatcaatccgaaatcgcacaatcttcatagagcccagtctagcgtccttgctagagtaggaaggatgagcaaaggaggaacgcgtgagtagcaatgccccggaaccggcgtggcgacgcctgatttccgcaatgttcacttccccgcatcccgaaattactcctggcgctgacctgggaatttgcattgaattagatggtagtttccatcccctgcgccgggaagtttctggcacttggacccgtaatcgtgccagttggcgtgacctttgccaaactaaatgggagtcggtttctgccggtttagatagggcgcagctgagccatttacggcaggtggctgggctattagaaaaagctccccagcggctatcttccgaggaggccgcgcaggtatcccctactattcgcagcctggcgcgagccggattttcttttgccctaggtaccgagcccctcactcctttgcgtttttctccgattctggcgcgtcctttcctggatatttgcgccccgggtgacgtggcgctgcgcttcgggattgatttttctgccggtaaagaccctgcccagcgcacagtcgccgctacctgcgtggcagccggtctagaactggtggccagcgaacagctggggtgttttgctctctgggatgatcgcttcggggcgcttaaccgagtgttgggggcgaaaccggtgcgggtgccgcaagcagatttaccggattttttgttacaagattttccgcgcctcgccgaaagtttcccggtctattctttggatgacagttttgagttcccaaaatatcgctacctgctagaagttggaacttcccgagcagaggatctttaccggattcacctgcgcgccatgcgcgaacttgggggtgaaaagattgaaaccagcgccctgccagttcagattgcggagctgaaaacccaggtgacgaagtggttgcgctgtcaagaaggggttttcactttcgatagttttctttcttgccccgctcaccgcattaaccagttactcgatgagctggaaaccgtttttgaggctcaagatttagaggttaatcgccatgggattccccgttcattttcgcaaaggggcggggagatcatcgtagatttagctcccaacacttacggctggttcacccccaaggtgcggttacatttagatgatcgtgactttggggccttagagattgcgaagattcgcgagcgcggtgggctaatcgatgccgatacttacctaagcgaagcagatctggatcggctgacgctgctaattgagcgcgctggccttaatcggcgcggtattcacccggcgattattgacctttcccagattttggagggcacgcaggcgcaggttcgcggcctggaagcatggaagtcacgccagctaaagttgccgccgatagccccgccccacaccgctaagctgcgcgaatatcaacgcacgggggtgtcctggttgctggcgcaactagcgattggtcccggagcagtgcttgccgatgaaatggggctggggaaaaccctgcagattttagcggcgattaagtccttgcccacctcgagtccggtgctggtagtggcaccaacttcggtgattaacgtttgggagtcgcaagcacagcgcttttatcccgagatggaggtgcgggcgctgcgtagcggcagcgatatcgaggacggttttagcggggcagatttagtggttacctcctatgggttgctgcgccgccactccgagactttcttacagccccaatggcagggggtgatttgtgacgaagcgcagctagtgaagaatccgcgtactcaagcctggcgcgtcctcaatgatttggatcgaaagtggacgatttgtgcgactggcactcccctagagaattctttagcggatttgcatgcgattttatctttggcgcaaccgggaactttgctttcgcgggagcagttttctgccttgcagctgcgcgggctcacccaggtgcgttctctggtggctccctatatgttgcggcgcactaaagcggaggtggcaccggatttgcctccgaagattgaacaggtgttgcgggttgatttagagccggggcatattgccacttatcgggaactagaggctcaggcgcgccaccaggttagtgggttactgcgctccggtgaccgcatgtcgattttggcggcgctgacggcgctgcggcgagccagcctggacctgcgtctggtaggaggacgcgcgggaataaccagcgcgaaaactaacgctctggtggaacagctacaggcaatacctggccataaagccttagtgttttcccagttcacctcttatttaaagttaattaaagaggctttggagggggcgggaataataactgcttatctcgatggttctacccggcagcgcgaccaggtggttaaggagttttcggagggagacgcacaagctttcttgatttccctgcgggcaggcgggaccggacttactttgactgccgccgactatgtgtttgtgatggatccgtggtggaaccccgcggtggaagaacaggcaatcgaccgcgctcaccgcattgggcaagaccgcccggttaatgtctaccgcctggtggcgaagggaaccatcgaagaaaaagtctcccagctgcaacaacgtaaacgcgacctctttacttcgatagttaaatcttccggctctatggcagagctagccagttccctgttaatggaaaataacgatacgaactagacgtcataatgcggataggttttatgcgccataagctgaatttctgcgtcgcctctagcgacttggtgttttctcctagaagattaaggcgaagcagaggaaaggaatagctatgaagaccttggaactattgcaggatcgccgttcgcgataccagctggagcggaagatccccttaagccaccaggaactgctggatttgattgacgaggtaaccgcgcaggtaccagatgctttcaacatgcaatcacagcgcctactggtagttaccggcgagaatcaagacgccctctggaatcgggtcttcgaggtttttgaaggtaaagttccgcgggaaaagatcgattctttccgtgccggttacggcactattctctacttctatgaccaggaagtcaccgaagagatggcgggtaagttcaccacctatgctgacaagttcccgcactgggcagcgcaatccctggccatgctgcagttttcgctgtgggtagcgctccgcgaggcgggcattggcgcttccctacagcactacaatccggtgattgaccacgcggtgaaacagctgtttgacctgcccgaaacctgggtgctagatgcgcaaatgccgtttggggttgccagcgatgagccgcatcctaagcagctacaagacattcgccagcgggtaattcagcgctagccgggtaaccactcccggaatgaccttaagtaaagaagattaaaataacccatttattatttacttaaaatttacggaatcgtccagttttatttaaccgtcgtcctatagcttgataactgcaatagctgcaggagacgcccatgaataaaattttttcgattaccgcttcccttataaccgtagtcgctttgacctttagtcttagcggctgcggttctaagactcccccctccaattcttcttcaaagccggcctctaccagaaccgcggatcaagcgccagcgtccgtggacattaaaggtaaatacaataatggttccatgtgggcaaaagtaggtcccatatatcgacaagaggacggaacctcagttctagcgctagcggcaggatattcaaaagaagtgaccgggtggcctgctaacacaaatgtggggcaggcgattactagcgtcaataacactgagcaaatcgcttattcggggattttcctgctcaacgattcggaagtgttcgagccgctcagaatgaaagataaccaggttgcttgggtgccgcaggacgcaaaactaaaaaaagaacagatgcattcttttaaagaacagcaaaaaggcgaattaaaagaatctgtactagtgcctttcggcgacatcggtaaagacactaaagccgccggggtttcagtggggctaatcgggtttgcggcgaacgtgccagttcttgacagtgcgcaggctccccagaaggtgcaaaaagcactggggaagataccgcaggacgcagaggtaaatatccacgccccctacacccaatacactatgaccccggggatggggatttcctccggtaaggagaacctgaatgtaactttggcggcagacgtattctttgactcggggaaatgggatattaaaccggactccaaatctgtcctcgatcaggcagccgccgccctagctactcacgagccgggcgaagtcaccattgttgggcacaccgatgatgtacccgataagaacgtggggaaccaagtcttgagtgaaaaccgcgccaatgcggtaaaagcggttttggctggaaaatctgagctggccggttttagttttaaggcctctggtaaagccgctacccaaccggcggtaccaggaactaccccggaggcgcgggcgaagaaccggcgggtcgaagtcagcataaaaactccggttaagaaagaggttgccgaactgcaggcggcgagtgccaagatgcctgctgcagacgctagcgagtctacttggccggccgcggtggcatacgatgccgatactaccggcgctaaacccaccactatggaaatcattgcctcgaaagcggtagcgtacccgcactatactttggtgacctttacggttaccgccaaagacgtgagtatgtggtttacaagtctgcagttcgaggcgaactatcatggcacgcccaatggtaacaacaagttttacggtgccgatattttgcggggccaggttcgtaccgccccactagagtatgcgcgccccctacaaggtggcaccgagcaggcggtagttgccggagggggcgttcacggggctggcaccagcataaagtcgggttacaaactgactatcccggtcctgtatccgcctaccaaagaccagaccatcaccatagacgccacctaccataacccccaggtcaataagaaagacttaggttggcgcatcaaagatattcccgtaaaaccggcgaccgagggcggtaaataagcaccgaacaagcgtgagataactaagagatagttgtctatcatgcgtgtagcactagaaacatcattagtgcggctaccctagatacttacgaccagctttactgggatatctttctgggattcgctcagctttccctaggtggcgggcaaagaatgttatataaggacgccctgctcgccgctcttatttttcgtttctcccggtgttagagaaaggggcgctactacctccatagtgtcttctagcggaatttcgcctaatgctgccagcacacacctgcctacgtggtaacccaagttcactggcacggcgttcccgatctgcttatattgcgcggccatggatccgcaaaactcccaatcatcgggaaaagtttggatgcgcgcatactcgcgcacagtaaagggtcgcgtttcgttggggtgacaacgctcggtctgtttttgcgccggattacaggttaaagtaagtgccggctgattccatgccatacgacgcgccattccagttttacctccccctaaaaagtaggaggcacccatatattctcgctgtatctcatcaggtaggtctcgccagtttccgccctcgggaatcatttccataaccttggctttacgctcggtgtagcgctgcccaggggactgcggaacattttgcagcgcctctttcagagttactacatagtcattttctttagggaaaatgattggcaaatccaggtctttgcgagtggcaaacaagataagtcgttcgcgcttttgcggcacatctaggtattgagcccgcaagacttggtagtttactcggtaccctagttcatcaaaggtattgagcatggtggtaagagtattgccgtgatcgtgtttgaccagtccgcgcacattctcgccgattgcaatcgcgggacggattgctctgatagcccgagcaaactcgaagaatagggtgccgcgcgtatcctcgaagcctcggcttttccctgcataggaaaacgcttggcatgggaaaccggcttggataacttgcgcgtccagctttgaaaaatctacctcatgcacgtcatcggggcagatgttccagtcaaagccgtgagcctgactattttgccgcaaagtagctaccgcgtcccggtcaaactcattgagaaacacatgtggcaatccagcattatggaaaccaagagcggtaccgccacctcctgcgaacaaatctatgcaggtagcccggggataggttttatccgaacgcaaaacagtaaatggtttttcctcgccattacccgaaagtttccgctgcaatctttcgatttcagccacattaaatagacggtttcctcgtccatccctactagatttaatcagcccctgtttagcccaacgacgaatagtatcaaccgatacttttaactccccagcggctataccaatttgaaccagcttgttgcccatcaacaccccttgacctagtacccttgcctaggtaaaggttactataaattatttcctgtccgctaggctggcaagctagttgtgaataacttttccatttctgcttcatcgagctttacgccctcaccagtaaaatctgcaaaaatccgcggtaatgccatatagagctcgtgtaaagcagtggggcgttcgaacactaaggcataagcagttaccccgtcacataccctaacgattggtttttcagagcgtcccgatactttccaggggtgatcgtattgctctggagtttttggcactatctggaacagataagcgatggcatcattggcgcgcgcaagagaatctaggcgatcccaggtaaatttttcatcggatgctttgatggtgttgaaccgattcttcacctccgcaaacagcggttttccatgtagaggatgcaaaaatcccggtattgttctcaaatctatggatccacccgaggcgccagtttcagtccaattctttgccagtcccagcacccgttgatgccagtaacccacatttcctgacagggtcttattgaaggatcgctgttcttcaaaaatctgcgcctgcgctaatccttcacctccaagcacagcatgagctactaaagtgaagggatctggaggaagggtcttgccgcgttttgcagactctatcttcttaaatgctttctcaaaagatagccttgtaacctcatacaaagcatcttcatcgatccaatcaagaccgtaggaatgattttcgcccatactaaacctcatatacctggcactgtgacattccaagagtaaaacctaggaatacctgtatgttaccaatttgtatctccttaaatccctagcagagttctaaaaacttatccatagtcgcgtcctcgccctgagatcgctaatcctgagcattatttttaggcggtgtcctcactagatttcaatatagtctcgcgtttttgaactcgcgctcccctagttaccagcgggtatttcaaaagtagaacctttaagtctgagccgcgtgcttcgttgatagggtggcaaagatgaagaaaacgaacgcgcgcgggctggaaatcctgttagctctggtgatgatggctcgtgggacttcgtttattttcagcaaattgctgctagaaaccatgagcaccttcaacgtattggcgctaagatttgggatcgctttcctggtactggcagcgctgtttgctcgccgcctctaccgcgccagccggaaagtatgggtagcgggattcctgattggattcctatatttcctggtgatgtcactggaactgaccgccttgactatggcagatactgggccagtagcgctcaccgaacacaccagcatcgtgatggtgccactcgccactgctgctttggcgaggatgcaccctaatcccataatgctggtatcggcttttctggcggttaccggggtggggatgctgaccctgcctggcgggaacctttctaccgggctcttaatcgccctactgggagccgtctgttacgcagtaaccatcatcgttaccgatcgagtaacccatagccccgaggaagggttcactgtcggaattattcagcttggtacgctcgcactcttagctgggagcgccagttttttcgtggaatccccgcatttgccctcctctccggcgcaatggggaatgttggcagtgctagtagtggtgtgtacggttttcggttttactttccagccggttgctcaggcgcgggtatcggcagaaatgaccggactactatcagcattaaacccggcggtagcagcgataatcggagcattcgtgttacatgaacagtttggctggatgggtgcactcgcggttgcgttgatcctagtcgctattaccctccccagctggctgcgcctcctcacccctagtgccggaaacgatttaccgtagttacggctatgcaaagctatcagctataaagcgctagggtaattagtgcaggagcagcattccgccggcgaagcagataattactacgaaaagtagcagaccaagcgaccagcgaataacttcgcgtaacagttcgatttccttttctggcgcacccatagaggcggccgcaatcgccagggattgcggggcgatcagtttcccgattactcccccggcggtattgactgcgactgcaaaggcaccgggcagaccaatctgcaaggcggtggtttcttgtagggaggcaaagagggcgttagcggaggtacttgaccccgaaatcgcggtgcccaggtatccaatcagcggagacagtaccaggaagaaagttccggtgcttgccagtaaggttccgatggtcaagaccatgccggagatattcatcaggtaggccagcgccatcacttctaaaatggtggccgccgaaaagcgcatagaatggatggcagcccccagttcttttagcacccgcttagcccccaagggataggttcccttttcgtgcagcagggaaaaagctatgccggtgatgatcgcggagaatgcgatcaggatccccggttgggaaaggatggggattatcacggtgccgatatgggaggccacctgggggttatcggcgctcgctaccttcccagccagtgccggccagctaacctgcaggtcagtggcgcttagagtgttcgcaaacagagacaccatccgtcccaaagacaaaaccgcaatcaccaaagaataaggcagcaccgccatcaccacccgccctatgcgcagatcagtgggcttttcagttacaaactctttcggaatcggaggacgatagattagcaccatcaaccacaccaccaggaaagtcactatcggagggagcaccccacccaactcgaaagagataaaacgcaaagtcaagaactggccgatgccttctaccagccccattaccagcgctaggggaaatagttgtcgaaaattcttcctatctattagcaagataaggacgaaaggaatcgccaacgccaccgctggttccgtcaaagacacgtattttgctatatcagcggcattttcattgatgtgatgtccactcatgagtgcggcggcagtggtaatcggcaccccgaaagctgcataggccacgggagaagtgttcgccaccagggcgatgactgcagcttttagcggtttgaaccccagtcccatcagtaaagcagtcacaatcgctaccggcaccccaaaacctgatagcccctcgagcagacccccgaaacagagggcaatcagcatggtttgaatccgcaaatccccgtttcctactgcggagaaaaccttccgtaaatcagtttcgcgtccggttgcttgcattaggcggtgcagccacaccgccgcaatcacaatcacaatgatcgggattagcccttttaaagctcccagcaggctggcggatatagccatggtgatgggcattttgaacccgacgatggcgacgattaaacccgtagctaaggcgattaaacctgacagatgcgagcgcatcctaaatgccccgacgagaacgaaaaataccactatcggtagcgctgctaccagggcagatacccaaaggcgatcccccacagcagtaacatcaggtacaaacattttattgctccttttggtgctactttgtgattttagcgaccggaaacaggagtggaaaatagcggagccattaatggcagaaaaataatgcccggaggattatttttgcactggtccccagtcacgtgaccgcgcgtcctcatgccctttagtgacctttaactgcaggaataagaatctaggttggttaaaagccggcagggatcccccatttttctttccctgcctcctgctcacatgctggacagttgcggggagcatgtccgcccccacttgctgctgggcaaggtcggcgattttgtttaacaaataatgcttgcacccgcgagggtagctgcgtaatatgcacttcgtggctagaacacaacgccattattttaactatgcggcggttattttatcggggttcctcatcgccctgctgataggaacctgcctgttgatgctaccggtatcaactgtgcatgtcggggggctgcccctgctgccggcactatttaccgccacttccgccctatgcgttaccgggctaaccattgttgataccgccacctattggacagattttggcaaagtcgtaatcttgctgctgatccaggtaggtggcttcggggtaatgagctttgcggcggtgctcgcccaagcagttatccgccgagaaaaccacagcactaatctggtctccgctgctgaacgccgcagcggcagcggcaggatccgtaccctgctgcggcgggttctggccacttccctcttgattgagctattcactgccattcccctgacgattcgtttcctgtccttagggtattcgctgccccgcgccctctggcatggggtattccacgcagtttcggcttttaataacgccggcttctccctctattccgatagtctgtcctcctttgtgggagattggggaatatgtttacccctaatagtggcaatcattattgggggtttgggcttccccgtcctctttcagcttcgcaccagcttgcttaaaccttatagctggtcactacacacccggatggtgctagctggcaccgccgggctgctagtattctcttccctgattgttaccgcttttgagtggcataacccgaaaaccttaggaaagcttcctaccctagatgcgattctggctggaatatttcaagcggtgcaaacccgtaccaccggttttaactcgattgatattgggcaaatgcatgagtccaccctgttcgcgatggatacttttatgttcattggcgcgggacctgcaggtactgccggcggtatcaagatcaccactatgtttgccctgctagctatcgtggctgcggttattcgcgggcgcaaccaagcagtggtctttggtaaaagcatctcagctgacgtggtgcaccaagcggtagcggtagtggtattggcctttatcctggtagctaccgacaccatcgctatcctgtatttaacccacttcaccttgtcccaaaccctatttgaagtgctttcggcatttgggactgtggggctgtctacggggataaccccgcaacttaacaacccttcgcaactaatcctgataactttgatgattattggacgactaggtccgattacggttgcaaccgcactcgccttcgcacctagcgcctccaagatttccttccccacagaaaggccgatcattggttaacttctcaaaacctacttacgcggttctcggtttaggacgctttggcagcgccgtagcccgcgaactgatgtccgactatgccgtggttatcggtatcgatttaaacgaaacggtagtgaaccgcaataacggcatcttgagccaggtggcgcaaaccgatgccaccgatatttcctcgataaccgagctgggggtagccgattgtgatggcgtagtagtcggtatcggcggcccccacgtggaagcgtctatcctcgcctgttctctgcttactgatatgggggtcaaaaacctgtgggcaaagtcctccgggactgctcacggccgtatcttggaacaaatcggggtgcctcatattgtgcatcccgaggtagctatgggcaggaggatagctcacctggtacggggggtaaacctggactacgtggagctgtctgctggtaccgcaatcgttagaaccattcttcccccgtccgctgccgggcctctagatgaggtcgatctttggaaccgatatggggtaaagatcgtagcggtgctgcgagaaaaccaatggcaaccggtactgcaagacatcgaacttaccgagggcgaccaagtacaaatttacggtagcgcgaaacaggtagaaaagttcgcccgcctcgctccccgcccgtaggtattttctggagaactattaattatctctggtcgcattttcgtaggcggcgagcaaatcattgattttctcagtcgcatatgaatagtagatatagagccattcgccgatagtatccccttcggattctttaacaagcgaccagagataccaacaccagccggcgaacactacatacgaccaaaagtggcgatgctcagctggagtcggggtgcggtcaaagtaatattcaagcgcttggtctgcgagttcattgttcagatcagtggtagcgaccaccatcgagccaaaatctgcggcaacatctgacattccggcatattcccaatcgataagatctaaatcgccctcgggagacaccaagaaattcaagctagaaaaatcgttatgactgggaacaatcgggaaattatcggcatctgtgtagcgttttaaacgcaatattttttcacgcagtgcttcatagccgggaacgtcaataggactatgatgtttaagaatttcttcatagcgcaaaccttcagccacaaagtcaaagttacgcgtaagctttttgccactttcatgaagccgcctggacatcctcatcgccctacgcaattcgtccggattactcacgtcgaggttgcgacagtcgggaataaaccgagaaatcttccatccttcaatcggatcagacgctagaaaagttgagtcaagcccctgttctctcgccaagttcaaggcttcgctttctgcttgacgatccattattttatctgttcctacccctgggtggcgatagacgtattcgcggccattaacggaaaaatgacaggaaagattggtaatcccctgcttcaacggatagacatcttgaatatcgttgacatcgcacccaagggttttcttaatattttcaaaaatttctgaatccacattttccataaataatggatcaaatgagcggagctcatcaacagaatcaaattcgttaatcaccccttctggatacttgcggatacccatagcaaaggcgtttaggtgatcgacatagatttgttcccacagtttaggagccgtttccgggagggtgtagacattctcgagtatccccacaaacgtccgcgagaattcacgatcaaaatatacatgcccgagcattatccatgcgtccctgccgccgacagtaactccggttatcaacccatcgctatctgtttttaggcaccactcgccagtttcacctttaacatactgagctgaatagtaagcacgataaacgtgcgattcgaagggattttcagtgaagtagttatcggaggaacacacataggtattggctagtttgtcccgcaccagccataacgaaccattattgttgcgggttgcatattcggagttgactacaatgttcaccccgtatttttctgcgagatagaaaaagtattccttccggtacccgacaaccacagtaatgtccgtgattcccgcttcgtggagctgctcaatttggcgctcaattagtacttcaccacgtacccgaagcgtaccttttggacgctcataggaaattggcgcaaaacgcgaggaaagtccagcagccataattaccgcattatcaaccgcgtagggggctagcgctttctctccagccgctgttatctgttgctgcgctagatagccaaatgcctcaagctctttaactgttgcattcaccgctgctaggggcatgccagtcaatgattgaatttcgctgtgctttagtgcttccgaagagcgaaaaaaggcatagagaacatcaaattgcgctttagttaggcttgagagcataatccatccgttcaaaatccgcttgtttagattcctatctaaactcgtagtgtgtaaaacatattatgaacagttcgcgtcttggtgtcacattgtcgctgattttatagatctttagctttcacgaccgacataccaggattgattagcaattgtgcgcagtacgttggttgccatctgattcatatctctgttctttaacctgcaacgatgggcaacgattctttcgtatatgcccgcaataaaatcatcatcggttattcgtaagcggcccctttttgccctcgtctgtcgacccctactagggaaaatggaattttccgagggctaccgaatacagatgtactgcagcgcgaaacagctagaaaagtttaaccgcctcgctccccgcctgtagctgccctaacccgctgcggcctctagcaaaaaccgggctagcggcctccgcaaaccttattgtagtggcgataacccaagtagcggcacggtctacgattcgcggggactgttggtggtgtaagattttgagtaaaacaagctgccgatcttgttagctgttactgctagcagtgaataggcgaccccgtaaatcagcgcggattcgttgtaaaagatgagcatgggcgcgatgaaaaatagaagcggcaggaacgtccacaaaacggtgaacccttcccagattccgtcccaggcggctagcgcgacggtgattagcggaaacgctatgaaaagcagcaggataaacgccatcattcctaaatcggagggattgactaatccgatggcggttgtagcgaaagccggcagtaaaagatagcaggcgaaaagcgcgccaagtcgcgcccacgtgccgcgtcttttccacctttgcatgcactcattttttcatgagcagaagggaaaaatcatgggtcttagaaactggctacgccccaaaccgcgcgacgttaaaaaccaccagatgaactcgtcctatccgtttatatttgagccgacgtcttctgggcttccggttaccgaacgtagcgcgatgcagaaaacgctcatctatcgcgtaatcctgcaggggatttagggatctcaaatctactacgagtgctgcgttaaagtagaaggtgcagaaggtgggaacaaggtctcccatcatgtcttagagggtgtctagcggacgcaagcgctgctaggctctcttcttatttcatttccggcctacgggctattaccgcgctaacctgggagatacccgtcacgcaatctgccaacactaggttgatagaagcaacaagatcggggttaatacccaaagtggcgggttaatcccaacaggagccatagctacccgctggaattaacccgcctagagaaaatccacccgtcgctagtgcaaaaccaggaggccaattaagcgttaaacgcctgctctatgcgctcgtgcgcggcccagatctgctcaggtagattcttgaactgtgcaaggtgttcgcggcggtagcccatctccttcttccacagatcggtgtcgatggaaagaagcttatccagatcggcgtcgtcaccttcgaaaccatccagattcaactcttccttcttcggcaaaatacctaccggtgttagcacgccctcagcgcgcccttccttaacatctagcagccaaagcagtgcccgcaggttgtcacggtagccaggccagaggaagtggccgtcttccggatcgcgctggaaccagttcacgtgcgcaaaaatgggctgttccttcgcggagccaattattttcaaccagtgggccgcgtagtccccttcggggtaggacatgaaggggcgcatcgacatcggatcgtaacgcagcacaccctccttgccttcagccgcgaaagtggcttgggcgcccagggtcaaaccgtcgtaaacgccctcggttaggtcggtgattgcccggataagcggctcccggtcctttactcgcccgccaaagatgatggcgtcaattggcaccccttgcggttcttcgtaatcgggagccacgttgggcacgttagccaaagacgtggtgaagcgggaattgggatgtgcccactcgtcacccttggcctcgcagcgctgtcgatcggccgggcggtcggaaatcttttcgcccttccaatcccgccagccagtaacatcttcggggtaatccggggtcttaccttcccaccacagctcttgggtttcggggttgtaggcgacgttggtgaagagcgtcttagaaccttctttgatggcgtccatggcggtgggattagactgccagttggtgtcctttgccacgccgaacgcgccgtattcgggattcatgccgtaaatcttgccgtcttcgccaacgtgcagccacacgatgtcatcgccgtagaagtaaacttcgtagcggtcacccaaggcgtccggggctagcatcatagcgaggttggttttaccggaagctgaggggaagccgccgcacacgtagtaggtgtgatccttgagcttatccttaatcccgatcagcatgaactgttcggaaaggaattccccggagacccagccgtcgtaagaagcttggcgcagaccgtgggcgatcttgccgagcagcgcgttgccaccgtaggaggaaccgaagtgcaaaattgtgcgttcgtcggccaccgtggcaaacaggcgcttatccttatcggtaccctgccccaagttcttcaggtcgccggtcacgtgcactgcgcgcacgaattgtcccggattttccaaattgttcaggtgttctacgccaacccgggccatgcggatcatgtgaagaaccacggtgaggttgtcggtaagttccaccccgcgagcccacttttctagcggcgatttcggcggtgccatcaggtagggcaccacgtacattgttttactccgggaggcgcccttcatgctttccaactgccgggcagttacttccgtggcgtcgtgccagttgttataaattccggcttcttgcggattgtgggtggcgacgacggtgcgctcctcgctgcgcgccgtgtccttgtagtaggagcgggagtagtagagtccatcacccgcaggtgcgatttcaccggtggctaggccttcggcgatgagtcggtcgtcatcctttgcggaaatgacttcgatggcagcgggttcggtaattccggcccagtgcgctacatactcagctactgcgggattttccagcccggcatcgttgaggatcttggcaatgttatccatatttattactcctaaaatttcgtgtagtagaacattaaatttaggatacccgaaacttttgaagcaaacctggatttaagtcctgcctggaataaataggaacaaaacctgggacgctgcagtatgggctagtaaatccgctaataggcgagccctctgtgggctagctagtttcttagctctcccttttctcccgcctatgtgtcggctagattaccccgacattacttgaccaaataggaggcactcacgctagtcttttgttaggcaaggcttacctaattaaatattagaagggatatatcgcatgaaaactcgcgacttcatcaacattggcgtattcaccgcaatttattttgtgctagttttcggcaccacaatgctaggcattattaatccagcaatgatgttcgtgggctatgccttaggacttatcgctaacggcgccgtagtcatgctatttaaatcccgggtaccaaagatcggcgccctggcattaatgggcttattagtggggattttaatggtaattaatgggcacccctggattgttgccctacttgcacctttactgggactagccgcagacttcctcttcgctaaaaactccgcggtttttcgagtgcttggatacgccgtcatgtccatttggtacgtggtgccctggttccccgtattcattgatgctcagggctactacaaaaatattgccgactctatgggaaccgcctacgccgattcattacgctggttcttgtcaccatggatgattgtggcctggggcgtgggagttttcattctcgggcttatcggcggagtcttcggaaattctctaatggctcggcacttccgtaaagctggcatcgcaaagtaatgagccttcaatgccaaactagcgcccccggatcagcagcaagctatcaccaggatcaggtcaccagcgctgaaatcttagcagccaaccaacgccactcccggccagatccgcgcaccgtaatactggttatattcgtattaaatgccctggtaatgtcgcgactacccatagcgatcactttcctggtagccggtattgcgctcttggctttactattgtcacgctgctattcatgggcgctaggtttcctcgccgtggaaggaacctgggtcgcttgcatctatcttttccccagaatctggccaagcgccctcaccgcgttcctaatggttttaggctactggatgataaggatttgcactgttggcggtctggcaggttacgcgattaaaactatcgtccccggagaactcgtagccggtcttcgcagtttacgcataccgatagctataaccgttcccctggtagtgctattacgattcataccgacagtatttcgggaataccgcgcagtaagagaagcaatgtccctgcggggattacaaatgggatggcgcgccctcttacatcccctccattttctagaaatggttttagttcccttactggcatcctgcgcccgaaccgctgatgaaatgaccgccgccggcatggtgcgcggtttaggatccactatttgcccaagcactttgaaacagcttcgattcaaccgactggacgccctctggatactgacgctaatcgccctgatagctctcatcccctactcagaccatctagctatactctcgggcggattcaaatgagaaccttaatcgaccatgtctccttcgattaccagttcaacccggatgaagaaacctcatcagctcacgttagcgcagtaagcgatatcaacctcgatttccctacaggatcctgtaccttaatcaccggtccttccggagcaggcaagtcaaccctattaaaacttctgaacggtttaatacccgaactttataaaggtaatctcagcggacgcaccctccttgccggtctcgataccgcgcaaacagatatccaacaattagggcgtaccgccgggacagttttccaaaatccccgttcccaattttttacagcaaatgtactagaagagttagcattcgcgagcgaaaatgccggagataccccccaaacaaccgctaaccggatcgcggaagctgtaaacacctggggcattcagcgactgctaggcaaagagttacgtaagctctccggaggtgaattacagctagttgcttgcgcagcagcagtagccggaccgcagcaaatcctgcttttagacgagcccacctctaacctttcccccgaagcaatctccgcattcagcaaagtcttacaaagattaaaaagcgccggctggaccctagtagtagcagagcaccgcgtttaccccctaaaaggtctcgcagatcaagtcgcaatcatggctgcaggacgaatccagcatatgtttactgcggacgagttttttagtttgtcttctaaacagcgtaaagagttggggttgcgcaccctggaaaaaccaaaaatttgcgttagagccactcccgatcagcaagcagacggtatcagcgtaaaaaatttaaggttcagttacggcaaacaccgcgtcctcaatattccttccctatgtttaccgaagggaaaggtagttgcgctagtcggcccaaacggagcaggcaaaactactctcgcgcgcaccctcatcgggttagctcacccggagggaggcagcgatattagttttagcggcaaatcctgccgggcggcagacagacaaagacgcagcgtgctagtaatgcaagatgtgaaccggcagctatttgccgaaacagtagcggcagaggtcgtactaggaaatgacaatctcagcgaagagcaggtgcaggcgcttctaggcgatctggggttgcaaggattatctgaacgccacccgctgactctttccgggggacaaaaacaacgtctcgtgattgccaacgccctggcgagccaggcagagctttacgtattcgatgaacccacctcgggggttgactaccggcacctactgtcgattagttcccagattcgctcactagccgctaagaacaaagccatcctgatcattagtcacgacttggagttcatcaatgaagtggccgattaccagttattgctccggcctctcgataacgaaataaacgtgcaacttaccgcgcctgaccaagagaaacatggaaagaggaagccaagtgacagatcaccaagttagcgaaccggcaaaagatgcagcggcaaatatcaagctgaccagcaaacaaggtaaagccgcattacgagaacttttagcgcccgtacaattggcgctgcgagttgggcaagtaatggcggttatatccgctattttgcgagtgtttcctttcgttgctctagtggggatcggcaacgaactcctaacctcattaggcaatggcgtatcccccaaccaaagcgtcatcatattttgggtacaggtgttaatcggaacattttgtggagggctgctcgcctattttgtgggcttgttagttacccatattgcagataatcgtctatctgcaagtattcagcaaaagattattcgttttctggggcaagctcctttaacttggtttagcgataacacttctgggcatgtgcgtaaagtgctgcaagacgatgtaaagaatctacatgtgctagtagcacaccgccccgtagattcactgatcgctaccctagtgcccatattttgcgcgggttataccttcactattgatttaagactcggacttttagtaattgttacggtgccgatttacatcattgcctacgcggtgatgatgcggggaatgagcgataaatccttagaacttgatgcaaaacttgatcaggtttcctccgcaatggtggagttcgtgaaaggcatccaggtggttaagacttttgggatcaccggaaaagcacaccgcaaatatgcccacagcgctaatgaagcctgtgactatatggaggaatggaatcgtccaatggtgcatgcggcttccctgaccgccgccctcacctctaccccattgatagttctcttatttggtattgtcggcccctggttcgtctccaagcattgggttagtccggtagaagtagttgccggttgtttaattgccatcgcattgccctcatcaattaacctggtaacccagcttgcttggaattaccagttagcgggtgccgcggccaaaaggattcttgatcttcttagggtaaagcccctcgcctgccctgatcagtcactgcatttaccccaagacgcaagcatcgaatttgaaaatgtatcgctcagctatgaccataccctagctttggataatatctctttacgttgtgcgcccggtacagtaaccgcactcatgggaccatcaggggccggaaaaaccaccctggccaaattggccgcccgcttcctggatcccgatacaggcacagtactaatcggtggagtcaaccttaaagacctgagtagaaccgatctctaccgtcacctggggttcgtcctgcaagatgcgcaactcttgcgggcttccatccgcgacaatatttctatcgggcgacacgatgcagatgaagccgagattattaacgctgctcgccaggcacagattcatgacgaaatcatggcactacctaaaggatatgacaccgttgtcggggaagatctgaagctatcgggagggcaagctcagcggattgccatcgccagaaccctactattggatgcgccgatactcatattggatgaggcagcagccatggtagatccggaatgtgaagcacaaatccaaaaagctattaaccatctaatggccggacgtactgttctggtcattgatcaccgtcccgattcagtcaaaaacgtcgatcaaatcgtcctacttgataaagggcagctggtggcctgcggtgatcaccagaagctacaaaatatagaactctaccgccgcctgtggtcggcatccaatgttgagctcaccgaaggagaacgaaactaaaatggataagtcaatgggagctatcgacataattcgaacaaattttcgactcagcgccaactctcaaaatcacagcagaagtatcagctggacagctcggatcatcagcggcattgcgcagggggtaggcttacttgcactgattcagctcgcaaacacctgggctagcaggcaagaagaaactgctaataacgctaacacctggattgtaaccctgctggtaacggcgattatcggggcaatcagtatctacatacgagataggttctcctacgaaggtgctttttcggtgatgcgctctgtccatcgccgcgttggggatcagttggcaaaactgcccttgggatggttctccaccgatactaccgggcgtttgtctcgcctcggggccgctactgtcaatgagctcggaaacctgagtgcccatttgctcacggaaatgtccgccgcaaccgtcactttgttgacgttgcttgctggtctgctctggtggtatcccgccctgggctcaatttttgcgttatgcctaatctgttacctgatactgatgtgggcattaacttatcttgatagtgctgccagcgcttacgcggcaccggcggctactgaactagctgatcggatcgtagaattttctacctgtcaagccatgctccgcgcatgtgaccagacgacttacccccaaatggccacggctttagcagaaaatcgccgccgatccgctcgccgactatgggtagaatgtatcggaaattttctcggcggcattgccgcgcaaacaatttgcgttgtaatgattatttccagtgttcatcttgcttttactggaagtcttgctcccttggcagtggtggcggttattgggataagcctggaaatcactcattacctttctacgatttctgattgtcgaaccgggctactgtcggttggcccgacaatggcgactattaacgaagtgctagatgcgcaccctctgcccgagccggagacctcgctaccccaatccctaccccatcaagttgagcttcgagaggttgattttgcttatgggagagataaacaggtgctcaacaaggtcagcttcaccgttgcgccccacactatgaccgcactcgttggcccttcgggggcaggtaaaaccactattgcccgcttaatttgtcgattttgggacgtaaactcgggtggagtactcgttggaggtcgagatgtcagagaactaacgactgaagatttaatgagccaaatttcaatggttttccaagatgtctatcttttcgatgacactttggaagcaaatgtccgcattggtaactccaaggccaccgaagaggctctcctacatgcggcagagttagctggggtcaacgatattgtcaggcgacttcccgatggttgggatacgcatgttggtgaaggtggctgcgcattatcgggaggtgaacgtcaacgggtttcgattgctcgcgcgatcttaaaaaatgctccgattgtgctcttcgatgaagctaccagcgctcttgatgccgaaaatgaagcaaatctgctgcgctcctttgaagtattacgtcgccaatccaccatgttggtgatcgcgcataaactcaacacgattactcgagctgaccagattgtggttctagataatcaggggcaagtggctcagattggcacccacaatgaacttgtaaattgcgaggggatttaccgagatttttgggatgagcgtcaagcggcctctggatggaaaatatccgcacaatagttcggaataggtaggtagcatacacggaattatttgcaagtattttcgggttagaggtcgttgaaatggcgattacttcaatatttaaggaaaaagtctagagattaatgccaattgtttttatagtgatttggcattgatgaattcactgaaggtttttgggagaaatcatgaggcatacatcaaattatagggaaactactacttctcgtcacctgtttattgcaggcaccatttttgctgccgccagcctattcttaacttctttaggagttgcagtagcccatgcagcagataccgaaacgaccagtgtaggagataacctcactgcctcctgggatccgacagccaaaatcctgaccgtcagtggccatggtcagctagatcgagccaaatggatgtctaaaactccggctacccacaatgagcccaatagtagattctgcggaactgttaaagatgcaaatggcaacgccaagccagccgaaccgcagccggtggaaataaaatttattcctaatccgggcaccaccatagatttcccacaagattccagcttcctattttcccactgtgacaaggccagcatcgactttccggatactggtattaataccggcaaagtcaccacgatgagctatatgttctataaggcgacgctggcgaacccgaatacctctaactgggataccagcaaggtgaccagtatgagcggcatgttcggcgccaccaaagcagctaatcccgatacttcaaagtggaataccagcatggtcaccactacgaacggaatgttccatacggctgcggtcgccaacccgaatacttccaactggaacaccgaaaacgtcaccgacatgagcgccatgttctataaagcgccagccgcaaaccccgatactgcaaagtggaataccagcaaggtcaccaatatgagtgtaatgttcagcgcgacggaagcagctaatcccaaaacttcaaactggaataccagcaaagtcaccagaatgaatggaatgttccagggtgcgaaagtagctaatccggatgtatcaaactgggataccagtcaagtcactgatatgcatggcatgtttaacggagcaattgccgcgagtccgaacacctctaactggaacaccgaaaatgtaaccaatctgagtggcatgttccagaacgcgaaagcagctaatccggatgtatcagcctggaaaaccaaccaggtaactgacctgagcgacatgttcaacggagctactgctgccaccccagatgtcgccaaatgggatagcagccaagtcaccaacatggaaggtgtctttactgcagcaactgccgcgaaaccagatgtgtcaaagtggaagaccaacaaagttaccaatatgcacaacatgtttgccggagccagcagcatagaaaatttggacgtatctggctgggatattagccaggttgaggtagagaccgtcgcagacgttttcgctactgaggggcgcacaagtgtacgaatcaaaggcgctgctttaaagcgtaatatttctagctggtttaagtttatagccggcccttaccatattcgcaatgttgacgatggcacggtgttgaacgctaccccgggtgacggacaaacagtttctgccatgttggattcagttaaagataaaatcgtagatgatgccacctacctaattcgtcctaatgaaaaagtaaaagtaacggcaactccggcacagatatggcaaggcgaaccactgccagtcttggattaccaggtggatgcggctcatagcaaagatttactcaccggtgctctcagagctgactacggggcagagaccccggcgggaaaggttgcgattaagcaaggaactttaaaacttaaagacgcagtagccggagcatattcactagaatttaccgcaggaattcttaatgttaatgctcgcccagagcaaccggaagctaaagttgatacttctaagtgggctgataacaatcacccgggggctaaaaattgtgccgatcgaaaggtatcccaaagtaggaccatcaccactacccctcataaatgggatagcaataaacataaatgggttttagatactgcaaacgcgaaggaaaaaactgagagtcaatcgcggaatatgaccgaccaggaaatccgcatatgcgctgataaccaacctggaaaccagccttccgttaagcccacagagcattctggtaagcaccccactgtgcagccagtccctaaaattgctccagtgaagaaaactgagcctactcaggtaacccagatctccactttgcctcagaccgggactttggttggccaaatcgcgcttctagcttgcttgctaggggccgccggcagcattgtttgccgcttgcgccgcaacacccgctagtggatcagtttatgactctcggggtttgttgaggcgttggggcggccaaggaaaaatccgattaacgcgggcagcgtattggatgtattcatccccgaattcattttcaagccagcgttcttcagtgtgtttcatcaaaacagtcaacgccacccaatagatgaacgggagggttagtagccaccagttcacttgtatgagcagcagaccgcagtttaatagcaggaaggaagaatatatgggatgcctaacccaagcgtatatcccgctagtcataagctgaccagttttaacgctttcgaccatgtgagagccaaaaacagctgaaacccacacgattactgcaactaccatcaccaccagacccgccgcaatcatgaggttatgcacccaactatttccgatagttccgtttgcgatccagcctaaaaaatggacaagactcgctgcaatcgtgacggtaaaaatacccgaaacatatatcggacctacacctaacacaggcaaatgcgaagctccgattttagtcatacagctattttcgcacgagcctaacccgctctagcaatggcagaagtagctaacactatggcaaccgtcgcagaaggagaagtaaaagcaatatcccgggtgaccacgccgcgcttattttctatgcggattgacccatcactaactaacttttggtgacgactagcgatagccgtataggagttaaccgttgcccggcttctggctttactggtttcccagctagcaaccacgatggatcccttgaggaggaaaaactcgccatcaatcagctgcatcgaggcattcagaccatctctacgtctgcgcagatggaaaaccggtgaagaagctatctgagcggtagccggttgcacagtattttctggggaacgcaaaacgttgactcccaggatcggcaaaatcagcttcatattatctaagaatgactcggctgatgctcgttgcgcttcagaaagcttcctaacccgaggggtttgcttgttatcaggcatagaacagcgctcagcattcttagcgatttccaccagacgggcttctaaataaccccaatgtccctcgttaaaagagcgttgcaagctagcaataataacgaccttttcccactgcggcttctttttgtcatgatcgcgcaagcgctctacaaagttttctgtcttgcctatatagcaccacgtgttctcaatagcttcagggtcattaccaagaagaatatacacaccattacaagcgattgagctgaatgaccccgtgtttgcatggggtttttgagacgtttgagtttgtttgaatctcgtagcgactagacatcatagttctgctgaagtcaacaccgctttagcaggaatttttatggtttttgcttctaatcataaagagattatttgcggaactcgggatggtaaaaactcagcaaaattgccgcagctatcaggactgtgcaacatgtcattggtagccacggagagagtccgtaaagtgcagtggaggctatcggtgccactacataggctgcaccattgttagcattaatcaacccggccagcccaccttgctcttcgggcttcatttgcaaagtaggcgccgtgttgtagccaggcatcgccagtcctagaccaaagcctgtcaagatgctggccacgatgaacagtccaagatttagtggataaaccaagagtagtaacccgagaagaacgattattaatcctcttctaaagagttttttagcaccccagtttaaccttggagccaccaaggcctgcgccagtatcatcaccacacccattattgacatgcacaaagcggtgagccctgctgttgcgccggccgctagcttcaaaacatcctgcagtaaaaagccgaaaagtgtagccacggtagaaaaagcagtaaacattaggaaaccgcaagccaggaacacgaatactcttgaatcaaaataggaaacttttgccggttgagcgactttttcttcgccacctgtgggtttgaatgttaacagcaaaacgacaacgcccaaaagcatgaccagaggcatcaccagcaagggcatcatgaaacctcctatagctgcaaggctgccacccaataaggctccaagaatagacgagaatccttgtgcagcgcccaagactcccagaccttttacccgttgcgtctcattgtaagtatgagtcacaacgtaggtttgcgcggctggggaaactgatgcgatggcaccgccgtacagcacgcccctagttatgactactcctatgatcaacgctatgccagtgagcagacccttaaatcctagccacaccaccatagcgaatccgcctagagtcaggattccggcaagcatgccaataagcaagatacgccgagatccccatcgcaatgagacccgtccccacctggtggaggtaagagaaaacattatggcagctaacgaaatggtggcaccaatatgccattccttcaacccgatttcgcgcgatagcggagccagaattggattaagaatcatctgccccatatatgccagtaaaaccgtcaaaaacaggggaaacagtcccgttatttttgattcgactttctcgtttcgttcattagtggcgcacattaaaacatcctttccaaagtgagctaccgatcaagctgaaacaatactagaacaatgttctagtattgtcgaggttgagggtatgctgttttcgtgggaaataaagacaagcgggtaaacacgggtagacgcgcctggctgacgcaggaaaagatcatgtacaccgcaatggaactgacccgagagtgcggtctagaaaaatggtcgattcgtgaccttgcgcagcgtctgggagtagttccctctgtcatttaccaccattaccaaaaccgtgacgccattaccgcttctgtaataggcgagatcactagcaccatcgaactaccggacgagcagctggaatggaaagattggttcatctccctagcagaaaatgtcaggcccgtctttcttgaattccccggagtcaccgacaaactgatgtatggacatatggacgccgcgtttataccaatcttggaggtggcttacgaaaaactacgggacgctggttttagcaagtacattcacatcgcatactcaattatcatcaacacgatgctgtggagcattactgctcgcaacttgcgcagcccaaccaagcaggaacagcgccacgacctaggccaaatgattacccaacttcagcccctagcggcctgctccacaacgctggctgatatcatccagggctacttaattccgctagccaacccgaaaaatgaagaccgcatgagtcaggaatactttgaaatcatcatagaagtcgtactcgctggtttagagatagcgctcttgcctcgcgaaaacgcctaacgaacccgtgaacaagagaaatcatcaatactcataaaatatttcccaaaatcgcaaggcatccagctaagagcagacccttttcggcctctccctctatttcctgcgattttccaataaatacaagaagatccactatatccagagcttcccaaacaactggtacgactacgtcaaatacggcaccgccaatgaactagctatcactcttcacagtacacaggcttctcccaggaatccgcagcctatatgaagactgagcccaccctattgcgtatggacgaagaggaaacctccatctcgacttctggcttacctcttcgacgaacatcaacgtgaagaaagaagccgacgaaatcttccactattgacttcctctcgcttataaagctgggaaagttgatcgcggcgtgcagaggtgaggatgcccgtccaatccgctatccccgcagtagccataccacctggggttccatcgaccagaaaaagctctaccgctttaccacgcgccatcacaaccacgcccctcgttcacacgcacctaccctcaagaataaccgagataaacagatcacccctcaatacgaggatccaatagaaaggaaacaccatgggtgatccaatagatctggtggactgctggcacatcgaaaccggcagagccgtaccgaaacgcatctggtttattgacgatattattcctgccggggtttagtggctaaatgtttcgtgagataacaggcgaatagctgaggatgggtggcgtgccactggtggcctgcaccttggataagctctaggcgagccgtggggataagtcttgagattttgcgagctgcagaaaggtttgctttatctttactaccgcaaaccacagttacgggcatggataaagccggtagctgcgaagtgaggtctaaatctttcaaactatcaagcactcccagcagctcaggtttgctaagctggggcggacagacccattttgttggtaaaactcgcattagtgtcttttgcagactcatcaacatttttgggagtttagcttgcggagctgaaacaaacagtgaagacaccttatctggatgggtgaccgcgatatttaaagcaatcactgcacccaacgataccccgaccaagtgaactggctcggttagcgagtcagcaatccgggtacatacgtcttcaagcgaccagcaagccagcggcggtttcattctcaaaacgtctaaagacatgcactcggtttgtggcagttgttttattaccgggttccaaacatcacgggtttcacccaacccgtgcaagaacactactttttgggcatcgttcatttacgcagcgcgaaaaaacctacgaccaggctagttaccagaaaaccagcagtatttccgatagcggtgaccggagaaatcacgtgcgtgaacccgaaaacagcaaaacagatagctgcaattaatagcccaacggctaccaacatcaaccggttacgcactcgcgcattactctttcccatattcgccctttccccttttacgtgttcgttcactgattatcccataactgtcgttaccggaaagaaaggtaaacgctcatggctgattcgtcttttggtttgaagattggccttgagggtgagctaaaaaagaactcataccgacaccgctagaacagcgttatttgcgagtcagagaggcgcatttttcatctccgttaacgagttaaaccctaaaaccctacccgaacagggaaaacacgatactgggtgacgcaaaacccaaacccgctaacgcaagcgatttttcacccccctaagcgatactcgctaacacaaaagggtacttatcaaatccgacgtctaagtggagacttaaacgtcggatttgataaccaatacgtgtgcgtaagcatctctattgagcggagttttgtagtttccgagccaattcagcgaatcgtgctggctctttagaccatcacgggtggatctcgccgctattagctgtcccagcgctagggatgtgacgctgatgggtacgagtgcgtttattagcgtaaaggctaaagcgagtgaaaccaggttgatggtatacctaggctttccggtcgtaccagtgggttgggcaggaacgagtttttgatgtgccgtgtgactttgtcgggccaggaagtcccgggagaggtgacccgaagtaaatacgccatcaccgttaatgcgccgaaaacctgctggctttgaccttcagggagtagcgcgaattcaggttgggtacgcaacgctgcggtgggtgccggggcaaaagacttgttccataatcgcccatgatgggcgcaaatattacggatgacagttaattgttccatccaccgcaccaaggggggctgtgttatagctttgcgctgctgattcttcgataactcatcaagattgatcttgatgttcaatccttcagatatttcaagttgcttcttggccggtaacccttcaaagaggagggagacatcagcaaaatcgagtacctctgctagcacccagaacggatatttcccgtcatactcgtcccggtagtgcttgatggcttcattgtttcgcccagctctagaaatccgtctatgagctgtggacatccatttttgatggtcgaacgatggcctgaaatgatcagggtcggcatagcccagggggtcgtctatacacaaggcttcacctatacgagtacgcatcgttatctcgacacgttccatcccgtcatgtacaagcgtgcgtagcttcctatctgcctcgtataaatcaacagcagccttaaacgtagttccgggaagaaaattgtcgcgacgacgcccgttagattccatgatgcgcgctggataccaataagccgacaggcgatagtaactaacgttggctaaccattggtgagccaacgcgacatcaactttcatgccgcgagagcgcaacaagtcaacatgttgttcaatggttgcggctggtttcacctgcttggtcaatgcacctactcttaagaagcattagaaagagatccagcccactcccgaccggagtcgaggcgggctgaacgattaatatcaggatatcacaagcaacctacaggcatctagtcgcgaatgttaaaacgttggattacccgccaatcaatcccagctagccggcaaacccatcgaatatttccaggcctgtcaatggaacgccctgatcgattacgccatcattggcgtaaaccagatccggttcatctttggaaccgggaaagaaatcacggtggggctttgaaatgaacgcagggtgtcaacattggatgcaaaattggtctctaataacttagaattctttacctgccatgatctttcgacttatccatagggatactgcggtcaggacgattgtcacggtcagtagtattcctgcgtttgtgagtgggggtagggttaaggcttttgctacccattcgaagattgcttgtttgttggaaccaataaaggatgatccggcgaataccacgatgaataccgcgaccagaaaaagcttggctttttccggaccaaatttgtaaaacagcggtagctgaacaatggtcaacagcagagtgaccgcaaaggcgaaactggccaccaaaacagtattttcccaaggggtctcaaccattaaataggcaagaacacctgtaaccgcgaaagccactaccccaagagcgagtgtaatcagaaaatttagattaacgagctcgtttctactgataggtccggcaagaatcgttcggtgcaccttggattcagcatcacgagcaaaggtggccgtaaaataaagcatcccaatcatgccaaaaataaacggaaagataatcaactggtttgcataaatccccacagcgctgatcgcaacgagcaccaaacctaaaacagctatatatgtacgattggcaataaggtctttataaaatgcagctctcactgatcttctcctttaatcgtgtagaccatgatgtcctcaatcgtcggtctaccagcttgcacaccagcaggaactgccccggtgcggacgattacttcttgaccaaaatcatgacggcgacgccctaatacttgcttggaatcaagctggtttgcctgctcattggtcaacgctacgattcgccaagaatctaagagttcatctttttgttccatgaacttcaacttgccctcacggatgaaagccacgtagtcagcggctttttcaatatcggaaacgatgtgagacgaaaacagaatcgagtgggtcggatcttcgataaattcaagcataatatcaagcacctcatcacgaatcaccggatccaaaccactggtagcctcatcaaaaatcagcaaatccgctgcatgggaaagcgccatcgctagccccagcttcatccgcatacctcgagagagctcacctactcgcttagacgaagtaagatgaaaacgctgcaggtaactagcgtatgtttgcccatcccaactcttgtacaggcgcttgccgaactcgccagcattcttaacagtaaaactatctggcaggctaatatcgtcaaatactaccccgactcgttcatgcgcttgtgggtgatctgcaccggcaggctgccccaaaaggtttattgtcccggcttcggggtgagcaagacctaaaatcaaacgcagcgttgtggatttaccagcaccgttctcgcccacgaaacccacaattgccccctggggaacttcaaggttaagcggaccgagcgtgaaacctggatactttttcactagtccgttgatttcaatcacattcatcggatcctcctaataaatcaatcagctctttcagatcagaaacagacaagccagcaacccgagccgaggcgagggcggatttcaaatagtcttcgacttttttacgctgctcttccttgagcaattcagtgtttttagaagcaacaaagctacctcgcccctgtacggaatcaatgaaaccctctagctctagctcgtcataggcgcgcttggtagtaatcaccgacacgcgaagctgtgatgccaaacgccggatcgacggcagcttgtcgccgggcgctacctgatcgttgattattgccgccttgagctgattcttaatctgagcgtaaatcggatcagaacttgcattagtaacgatgatatccacgaacacctcctagtgtttatagtgtacatgaacactaggatgaattaggtagaaccctccacattcagagaaatatttcaaacgccattgtgttcaacagagaaaacaagatactgggtaacgcaaaagggcacttattagacctgacgtcctagcgaaaaagtagttgctagacttttagacagacggtagtatgttatacaaggaacatggttaagcaaggagggggttgtgtctgagtcacagttgcgcaagggcgctgttgaactgattgtccttggattgctttcgtctcgtccttcttatggggggcagcttgtagagcgttttagtgaggaagcggggttggagatttcgacgggtacgttatatccgctgcttgcgcgtctacgtaaatcagggttggtagttacggcttgggaggagtctccggtagggccgccgaggaagatttataagctcgcaaaatctgggaagaatcgcttattgcagatgcgccgcgagtgggaggcgcttgattgtgctgtgaagcgaacaacgcagaaaggaatacggtaatgaagtggttcggtaaggacatagaagggcaggcgcgagttttggggatacctgtttccgggctgtggttggggcgctctgatgctgtgctggatggttttgaaccagagaatccgcgtttgttcattcctcgaaaatacggactgggttgggacgttaatctgggtgctgttggtgtgcgtttagggctaattcgacccgatgattctctaccggacttagccagctacgtccccacacgtctaaagcgcggcattaagctcaccactatttccggtgggattggggttgggttcttggcggtactgctcagtagcaaggagcaggttctcgtccagcgctcaacacgcggaggctctgaaagatttattaccggcaagcaggctgcgctagctccagtggttttaacgactgttgcagcactagcgccacagatctttcgacgcgatgacccagaatccgaagatgccgtacgtttggccaattacgctgatttgatgggtgttgaagccatgtccatagcctggcttgcagcaatgcgccgggctggtgacaagcaggaaattagccgccggtcgatggtgtccattgttgctttatggcccctcgttgctggcgcttgccaactcgcttatgtaaaaaccgcgttagccagggtaaaatcccggctgcataattcaggagacaagtaatgaaccctatagataaactgttgtatttgccaaccccagcattgataggggtttgcatccttataggagtgcaactggtagcggtggtctggtctttgatttgcttactgcgcgataagcgagctcacattgccggcttaaatcgcctagtgtggctcttggttatcatctttggccaagcgattgggccaatcgtctttttggttatgtactttcacgaacaaagacagcttaaggtgcagcgcgaatacgaacagaaggctacagccaaacatcaccaggttgatgcgagttcagtggtaagcaagctgtatccgaaggaatgaacatgaatttagcagtctctactaaagatttgtccaaaaccttcggtaagcaccaagtactaaacaacataaaccttcgagttcctaccggctcctgttatgggtttgtgggagcgaacggggctggtaaaaccaccaccatgaggatccttgcaggactggccggagccagtagtggtagcgccaccgtgctgggagttagtcgaggcaaacttccggtcaaaccgatcccaggcgtgtcttacctgactgatgtcccccagattagcccctggcttagagccaaggacgcgctcatcactctcgcccgccttggtggaatctccccagaccttgcagccgaaagaagcgacgaactactcaatctggtgaaccttgacaaagcccccggaagaatcggctccttttctagaggcatgaagcaacggatgggaatagcagcagcactcgttactgccccgaaactactactgatagacgaaccaaccagcgctcttgacccgattgggcgagcagatgttctggggctactacgcgagttaaccgggcaggtaacgatagtattttcctcccacatcctcagcgatgtcgctaaagtctctacccacgtggggatcttgcatcgcggtagcctgctagctcaaggacagttaggcgagctagtcagtcagcaaacaaaacacgttacgctagatgtcacagtgcgttcagacattgccaccgccgcggctaaggctatctacagcctcgactctgccgcaaagattcaccccacctttagcggcttagatgaacttttcaccaaactaactaaggacggcggtaaaaaatcgtgaatacctcgagtttcagattgatctggcgctatcaagctgtctggctcctacgctcctatgggacatggattataggcggggtattcgttatccttgctctcacccaaggattgtttacccaatacacgccgcgaatcatcagatttctggccggatcggaagtaaccacgctaatagagtcgctaccagaaccttcctggcagcaagcctacgcgggatggataaagaaccttatccaaattcttaccgtaatccttgttgcaatgaactcttttcgttgcagcgtgcttaccggcaatggtgacattccctttattttccctggtagcgtgcagcgctcacactacctcatcagctttgctatcagcagctggctatctaccctattccttgccgtcttcagcgctaccctggcttgggccggaacatcactgttattcccaggcgctaatcccgccccgatcatattggctagtttggtatgggcgctacaaatcattctcattcacgcaatacaaacggtcgcagccacttttaaaccaggcatcggcatgccccttgcggccggattcggagcctacctactaataacgatgtcagcgatatttatccaggagggcaacaaaactccccttggcctcgcccccataatcaacaacctcgctcaagacacactcgaggcaccttgggtctggccaatcaccagcagcctactgctaatcattgcgctacttttcaccgccacttacgtatacaacagagtagaacttaactaaaagccaaacacgggcgagaaaaatagatccaaccgaaaaatagaaatagaaccaccatcacaagcactacagctaacgccacctatcatccgttagcgagttaaaccccaaaaccctattcgaacagggaaaacaagatactaggtaacgcaaaacccaaacccgctaacgcaagcgatttttcacacccccctaagcgatactcgctaacgcaaaagggtacttatcaaatccgacgtctaagtggagcgagtgacgggaatcgaacccgcatgaccagcttggaaggctggggctctaccattgagctacactcgcaactggctttcgcttcgagttaacggaagccgcgagaaacagtgtaacctattagaggtctgaactgaaaactgacggggcgtggcgcagtttggtagcgcacctgctttgggagcagggggtcgcaggttcaaatcctgtcgccccgacttagtgatgtcccgcgacatgtgtcctcatatgtcgcgggatttttgctttctagcatggtctttagctgcatagtctgcctgtacgcgcggaaaagaggtttttcctcccgcccaaagttcggaaaatacttgcgtatttcccaaactttatgcccaccgcacccactcgaataaaacctcttccccgcgcttttcttgcccaatccgtgtggaactaactcgttttcccgcctctaaaaaacgaccagaacggggttactaaacgggagaaaactccctacccttaggcaggaggaaaaaccaatgcccctgcttgaactccaggtatggcgactatggtgtccggcacctagagaccacaaaagaaatctgtattaaccgcttgacacagccacctcaacggagttactgtattactacattgatacagtaaccgaaaggattgaaaggaggggacatggagctaaactcagcgattccgatctggagccagctgcgcgacgaattttctcgccgcatcaccaccggaagctggccaccgggaagcaagattcccagtgtgcgcgacctggcgcaaatggtgggcgccaatccgaatacggtgcagcgcgccctatccgaactagaacgcgaaggactggcggtatcagaacgtactgcgggacggtttgtcacccaagatcaggacaagatctggctgactcgccagaaagtattccgggagcacaccgacaagttcgccgccaccatgaaaaaagctggggctaccctaccccaaacactcgacttagtagaaaaacaatggaagcagggagaatctcatgactgacaaccagttaaaccagttcccaccccctccgtcttcaccccaaggcggaaaccccgagcagctggcaatggcgagcccttcaaccgccagcgccgctccccagcaggctgtgcccgctatcgaaataaagggagtgtcgaagttttacggctcccagatcgggctggccaacgccaacctaactttgccaagcgggggcatagtcggcctcatggggccaaacgggtgcggaaaaacgaccttaatgaaaatcttggcgggggtgatgcaagattacgagggcgaggttcggcttttcgggaaaactcccggagcagaaaccaaagctttcacctcctacctacccgacagttctttgctggctgatagcctcactccgcgctcggcaatccgccaataccaggatttcttcaccgatttcgattcggcgaaagcctacgaaatggtagattttttccgtcttccggccgatcgaaagctatcggcaatgtccaaagggatgcgcgaaaaactccaagtagcgctgatcatgtcgcgaaatgcgcgcgtctatctgctggatgagcccattagcggggtagatccggcggcccgggacgtcatcttgcgggcagttatttcccgcttcaatccccaggcagtgatgctgctatctacccacctgatcagcgatgtcgagcccgtagtctctactgccgtcttcatgtcggcaggacaagtatttttaaccggagatgcagaccaactccgcagcacctatcaaaccagtctggacggactatttagggggatgtaccgatgattactaaaataatgaaacacgatttcctggcactgcgtaaaccgctaggtattaccatcggttttaccttgctgaccgcaatcttgagcgcgatagccgtctcaattttacgtaactccgtagccgcaggggctaccatattcttattggcattcttaggaatgctagctgcctacctggtgtattcgataatccttctggttcactattaccgttccatgtacggcaaaactgggtatttcaccatgtcaatcccggcgcgtccgaccgagctattttgggcaaaaagcctttttaatctcttagcgctcttctttttcgcgctagtgttttttggcggaggactacttctattcacgtctatatttttagaagataccactggcgccgctctaaaatccttctttacaaccaaagagacctggcaagtagcgtttctagttcttatgactctgttactatcctcgatttccagtgttttcttctaccagttcatagttaccgccggaaacggcaaacctttcctggatcgtttcggaaaaattggcggcccgatattagtggcggtactgacctatgtgggaatgcaatttatcggcttcctgctgatgcttctccctgggcaactggtatttttcgcccccgatgccccattcatttctctggattgggatggagttttcttcattataattggaccgattgaccccagtgagtctaatcctgtggagccgccagcagttccaatctggtggctgctcggcaccggtgtgctcacggtggtcgcaggttatctcactactatcttcctaaagaaaggtacttccctgcgctaagaaaagtgaatgacagaaggatccctcggtatcctccgggggatccttcattcgggaagcaaacaagaaaaaccataaaggaaagcccctagcaggaaactgctaggggctttttcttaacttcgagctttactcgaaatcgtctgccgggctgtacagccccagctttaccgctttggccaggtgacgaggtgccacataggaacgtccatcattgcccttgaccgaagtaagctggggtgccttggctttccaagcagaccgccgggtgcgagtattcgcacgagacattttgcgctttggtactgccatcacggactcctctaactaatacaaatagaaaaataacctatataactgtgccatttatagcggaaagattccagtttcaaccatgtgatttgtctcgcgagcacgctatttcgggaaaacgggactcccaaagcaattttttccgaggacgcacttgggacgcacttgccccaaaacctcaaacctccccctcccccgcctggctagtagataggatcgagctatgcgcactatctacgcccctgcccgcagcgaaatcgagattaaacgttcccgtttcattgcctccttagcgcgcaccgatagtgaagaggacgcccgcgcgtttatcgcgcagattcgcagtgagttccccgatgctcgccaccactgcactgcttttattattcaccaagactccggaccagataccgcccgcagtagcgacgatggggagccggcaggcactgccggaggcccgatgctaaacgtgttaaccgaatcgggattaactaatctgacctgcgtagttacccgctatttcgggggtacaaaactgggtacgggcgggttagtgcgcgcctattccggcgcggtacagcaagtgttaaaggacgcccaaacggtgcggattgttacccagccttcctaccagctgcagctaccgatcagtgaagccggaaaaatcgaggcaaaacttacccaaaacggttaccagatcctagatcgagactttgccgaagaagccactttgcgattcgctgccccgctggaaactagccaatcgcagatcgaaagctatctgtcgagtattagtggcagggaaatcaacgtagagaccgcgcccgatatcacccgagaagtgcgggagtaaatgccacccagacaagttcgtttattagacctttttatttacctctgctcgaccgactaacaaatcagcttgcacgcagcttcccgcgcctacttgcgcccccggaacaagaaaactggcgactaacagccatccccaagttttactgagcgcataaaagttgcgccgcaaagagttaagatgttagaacttgaagtgaccgagttttcacgccagattggagaggcaaatgcgttttcccgtttcctcccgctgtcgcgtatgtcgctaggggcatcccgccgaccgcccaggcgcgggttgtcccacggggcagtaggttattttccgccccgaccccagatctttaaagctggatacccagcattttcacttaaaataatttgaaggaaaagcatgaatatcgcaaaagacgtaactgaattagtaggccgcactcccctagtaaaaatcaatcacctgctgccggcagattttgacggcgaagtagtagccaaagtcgaatcatttaaccccgcctcctcggttaaagaccgggtggccttagcgatggtgaacgccgccgaagcatctggaaagttaaagcccggcggcaccctggtggagtcgacttctggaaataccggggtagccctcgcgatggtaggcgccgcccgcggctataaagtggtgatcaccatgccagaatctatgtccaaagagcgccgcgccctgatgcgcgcctttggagccgagctggtacttaccccggcagcagaggggatgcaagggactgtggacgccgcccagaaagtggtggcagaacgcgaaggagccattttggcttctcagttcaccaaccccgctaatccccaagcgcactataaaaccactgccgaagaaatctgggccgacgcgcacgggaaagttgacgctttcgtggccgggatcggaaccgggggcaccgtcaccggagtaggcaagcggctaaaggaactaaatcccgatatccaggttttcgggattgaaccggcagaatccgccctactcaccaagggagaggccggggcgcacgggattcaaggcatcggggcaaactttgtgcctgagattcttgattcggcagtaatgaacgaaatcctgactataaaaactgaggacgcaatcgcgatggcgcgccaagccgccgctaaagaagggctgctagtggggatttccgcgggtgccgccttggtgggagcgttgcgtttagcgcagcgccctgatatgaaaggtaaacgtatcgtgactttgctgcccgatactggcgagcgttacctcagtaccccgctgttcaaagatctaatggactaggagaaaaaatggcgaagccggaaccgactttggtgcaactatgtaaagaagatttagcggctgccatcaattcggatccggctgcccgcaacaagttagaagtggcgctaacctatccgggagtgcacgcagtctgggcgtaccgcctggcacatatgctgttcaagaaaaacttgaaactgctggccaggatagtttcttcgatttcccgcagctataccggggtggatattcaccccggggctcgcctggggcggcgtctgttcattgaccatgccaacggggtagtaattggggaaaccaccaagataggtaccgactgtgtattgtttcaccaggtcaccttaggtggggtgtcgatgtcaaaagggaaacggcaccccaccctgggggatcgggtaatggtaggagctggcgccaaagttctcggcccgatccacgtaggctccgatgctcggattgccgccaatgcggtagtagtacgcgatgtgcctgcggggtgctctgctatcggggtacccgcgcgggtaactccgggatgcaagcagcaaaagaccgctgaactgattatcgaccccaccttgtttatttagggcaaggactcgtttttagggtgccggcagcctacctgcagggatcacgccccggaaggtagcggccacgccgggcagtaatatctggtttaggcagtaaacgtgcaaaatgaggcggcacgccctcgaaagaattcatgggaggacgcaatcacgccgataccgggcaaaactggtttaacagtggattaaaatccggctatcggtgaacgcacgcgccaaggcggaagcatcttcgactacaatttagaagtaacaagctagttgtggaggaaaaatgattagcacagttccggaaatagttacaggagttactcgcggggatgctgacgcctgggagcgggcacgttccctgctcaccgactactactgccaggcacacaatccgcggattaccctgttttctctgacctccaagttttcccccagttttccgctacaaccccaagccggcgtctcctctggggaggatgcctgtaacctgcgcgactgcgatgttgtagcgttagcgaacctagatattgaggtcgatagcgatagcctggatcaactttttgcttccgaaccactgcccgaacttatggggcaaatccccatcgacacccagttggtagatattccgctccaggtattcgaggacgaaactggccccttgtcacaggtatggacggcgctaactaaagatccgctggtgctaaaaccgaaggaagcggcggcgcttttagctcggctgcgtccggcggcgctccctcttttttcgaaggctgaccgccgcccctggggagaagtcagtgactatgttcagttctgcctagaccttcatgatctgttattagctgaccgcggacggctcgcgcaccagctttattacctgcgggaagccttggaactgcccgaatgggtttcgcaagtacagcttttacaggcattagtattcgcggcttcgcaggaacagcgggcagccgaaaaagaacggcttcgccaagaaaaagcggctcgccgtcaagaacgagaggaagaaaaactccgcaaaaaactagctaagcgctctaagaagcagcgcaaaaaacttgcgaaacagcaaaagacgcaaagcgaggcacaaaaagctgctgaggctaaggctaagaaggctcagggcaaagagtctccgaaagccgcccccgctaaccaggtaaaagagcgcaccggaaatgctcgccatttaggaggggaagaaccggctgacttgggtaactcccggcaagcgttgaaccgtcgcggacggcacgtgcgcgaagatgacggggacgacggtttcatctctaccgacccggtatccctctaaggtaactcttgccccaaaggttcttcctgtcccttagctagcatctgcagctaagggacaggaactttttaatcctctccctctaatatgaaactatgacgagttttgatctggaaacctacacccaaggtttaactgactttattacggcatccccctgtgccgccttcacggcgcacaccctgtctgagatatatagctcccagggctttaaaccagtcgatccctcgcagccttggccgcaaaaacccggacgctactttttacgccgcaagggcgccctcatcgcctggatcgtacctgcgggctcccccaaagggttccggatcatcggcagccacactgactctccggcattcaaacttaaacccacccccgatagcctcagccccgatggttgggggcagctaaacgtagaagtttatggggggatgctccctaactcttggttaaaccgagaactaggaatcgccggggtcgtttatgaccgctccggacgttgccatctggtgcgcaccggagcaatcgcgactatcccccaactagctccccacctagatcgcgaatcagccaacaaactggaattagaccggcagcaacacttgcatcccctctggtacgtaggaagctctcagcgccgaatccttgaggtaatcgcagagcaagccggtctcaacggagccggtgagatctctagccatgagctctacactttcgatactcacgaaccccaacggctaggaactaaccgcgagttcctggcatcggcccggcaagataatctgctatccgtttacagcgccactcaagccctattaagcctggcagaaaaggactttcagggagaaaatattctggtcagcgcagcttttgaccatgaggaagtcggttcccacaccgaaaccggggtcgccgggccgctactggaacaggttttacgccgctgcgccctcactgaaaataaacctgacgcgtttgaacggatgctggcggagtcctcgtgcctatcagcagatgttgcccactcagtaaaccccaactatcccgaaaaacacgaccccgacacccggccgatgatgggagccggaccggtactcaaactcaacgcctcccagcggtacgccaccgatgcgcagggctggcatatttgggaggacgcggccaggcgctgcggggttaaaacccaatgcttcgtatccaacaatgccgtcacctgcgggtcaactatcgcccccatgactgctacccgcctggggatcaccactattgatgtgggggtaccgattttatcaatgcactctgcccgggaaatatgtgcccttggcgaccaggtggagatagctaagataatgcagtcttacctgcagaaataactgttagtggtgggccatactggtttcgaaccagtgacctcttccgtgtgaaggaagcgcgctacccctgcgccaatggccccttgaactgaaactacgttaccggattttgagggcgcaaaccaaatccaccaatcttctggtacgcttctggtagcacgggagctttcgagctgagaggaagcaaaacgcttcgaccgttacacctgatccaggtaatgctggcgcaggaagctggttcacctgtgcgcatatttaggaggcacagatggaccgggaacaacagctaaaagtggtaaataaccagtggccaccccttagcgcctgtaaagccaccgaagttttaaatgaaatcccagagtttcgcgaggagcgaatcgctaagctctctccctcttcacgccccatggctgccgccggcttgctgaaaaccgctagcggcaaacaggtatttttaaagcgctaccaccaccatctggtcagcgaaaatgagctggaggctaagcactcctttgttaatcagctggcagaaagcggcttttctaccccgcgttttttctctttcaaccccagggggaccgtgctccgcttaggagagtggatttttgaggcttcccaaggcgcccccgggcaagaccgctaccgggatctgcgctcctggctacccccgaaaaccagtgaagaggcggtggaactggggagggtagctgcccgcttacgcctggccagtcaaaaaataaaaccgctgtcgctagaacccggcccctatcaaaaccggatagagctaatgctgggagacccgttggcgcgcctagcagacttcttaaatacccatccggtacttgatacctatttgaaggaaaatggagccgacctagcgggagcgctggagcctttgcgacccttagcaataacgcttactcctttaaagagcgccccgcgctactttacccatggcgacctgcatgtttccaatactttttgggaaggaaatgaaattacttccctgattgattttggactcgcctgcccaaatcccccgcttttcgacctggcggtgctcctggagcgccacagcatcgactggataagtattaccgagggtaaaactgacagctactggccggaagtcgccggtgacttactaagtggctatgggcaggtcttgccgctgtccggagaagaaatcgagatgctcggcgccatgattgccctgtgtaacgtagagttttccctttctgctatcgaatacgacctgctcgctccaatcgatccgcagattaaagactgggcctggaatattgggttccagggtcatagccaatggtttctgaccgaaccaggcaaaaaatatttatcaaccatcaatcaactagcgaaagaaagagcatgcgaaaaatagctaccgcattagcctgcactctagccctaaccctggcggggtgttccaccggatctagttccgcaactaaagatcccgaattgaagaacacttcggtgattttagactggactcctaacactaaccacaccgggatctatgtcgccaaagaaaaaggtttttaccgggaagcgggactaaacgtaaaggtaatgggtttttctaagagcggcgtggaatcagtaatggctgccaaaggcgcggattttgggttctctggcaccgactctatcgcctcctcgaaggcctcgaacctgggaatcaaaatggtgttcaacctgcaaccgaaatcctcctatatggtgggatttttggataaggctgatatccagcgtccccgggatttagacggtaaaaccctcgctgacttcgggggcggctatcaacatatcgccaccagaatgctgattcaaaaggacggcggaaagggcgatttcaagaaggtagtcgccggtgcccaaaccttacaggcggtagagaatgaacgcgccgactttgcggaactgctgtctacctgggagggaatcgaggcggaacagagcggctataaactacgctactttgactacgaaaagtacggggtgcctactaccccggcgctgctcgggatatccactcgcgcagatctgatcaaagataatccgcagctagtgcgcgccttcgtgcaagccacccaaaagggttaccagtgggcgatagaccaccccaaagaggccgctaagatcctgatggatgctaatccgcaggcaaagctagatgccaaattggttaacgcctcccaggagaaactttccaaagaatattggccagatgcggccggcactgtcggtcacgccgatatggacaagtggcaaagctacttggacttcattattgagcaaaaactggttgctgacggagatggaaaaccctacacgcaaaagatttccgcccccgaggtagtaaccaatgaattcctagccaaaaccagcagtaaatgaaacatagctcgcgtctagtcgccgccggactggtcctgttaaccctggctctgtgggaaggggtgtgccgtctggggcaagttaaccccaagctgctacctgcccccagcgtgattataaaagcggggatagcagactggccggcggcctcgctcgccacgcaagtaactttgattgaagtactggcgggtacctcgctagcgattatttccgggatagcgatttctttcgccctgtggcgggcgaaaacattcggtaaagcggtgatgccgctgctggtaatctcccaaacgattcctgtagtagccatcgctcccctgctgattatctggttcggctttggtatgacctcgaaaatcctcctggtggccttgtttggggttttcccacttatcgtggctttcactaaagggctatctgcgccctcgcgcgaccagatagatgtggcgcgctctctgggagcctcccccgcctggatattcgcccatctgcgaatgccggcagccctgggagactttatgaccggactacgcatcgcggtcacctacggtcccgccactgccgccactgccgagttcgtgggggcagaaaatggtttggggatttatctactcactgcccaaggatctttccgaacagaactagtgttcttcggagccggaatcttgaccttgatgaccttagcagcctacctgctggtagaactggccgaacgcatcttaatcccctggaagaaggcaaaatgagcctactagaaatatcagaggtaacgaagaaatttactaccccgcccctgattgccttggaggacgtggggataactatcactgcaggaacggtaacggccctggtgggaccctcaggttgcggaaaatcgaccttgctgcggataatcgccggtctcagctccccagatcagggaaaaatcacttggtctgtgccagaacccctagttgccttgatgccgcaacgcgatggactattttcttggaacacgattgaagataacgtggccctcccgctacgtatccggggagtgacccgccgggaagcccgcgagcgcgcccgcgccctcctcgctcagtttgagctacaacaattttcccgcgcctacccggcgcaactgtccggggggatgcgttcgcgagttgcttttttgcgcactatgctcgccaaaccgaccttaatcgccctggatgaacctttcggggctctcgatcaaataacccgggctcaaatgcaacgctggctctggcaagctactcgcagccgcggtttaaccctcctgctagtcacgcacgatattgccgaggcagtaaccctagctgaccgcgtgttggtgatgtccgagcgcccgggccgcatcatcgcggacgtagcgatccagattccggaacgtgccgagtttttatcggcagactcaccggcagcgaccggaagttctactcaccggaccggtctacgtaccacacctaaatttgtgaccgcttatcaagaaatcgaaaacgccctctggggcaattaaataaggagaaaaaatggatttaacccgaatccgcttggaatatgtagttacttggcctaaccacgcaggccttttcgtcgcccgcaaaaaagggtggtaccaagaagcgggactagatgttgatatctcttgggacggtttcgaccgcggcacccccgcacagctaactgctaaaggcgagttccagtttgcctccattaggctgggagaactgctggaaacccgccacagcgaccaccccttcgtagccgtcgctacctttaatcaaaaccaactaggtggggtgattactctccaggagaaggggattcgccgttttcgagatttagaaggaaaaaccgtctcaattccgccggttaaacggctcatccaaatggtagtggaagccgtcgaaaaagatggcggtgatttttccaaggtaaatgtcgtggatcccggagtattcgaacccgatattcgcgcagttgaaaaaggcaaatatgacgctattttcaatgttctaggctgggaagcctaccagggcagtaaaccattctccgaggtagtccaactatcctttgacgaaatgggagttactccccaccacgcctatttcctgtgcgtggaagaaagctatctgcgtagccacgaagatcaggtacgggcgttcctggctgccactggccgcggctacgattttgctcgtgaccagcagccagaaaccgtagacattctggcttctactatgtgcgctagtgaagaggataccttgaccgcgtccctcaaattcatggcaccgtcctggcatgcaccctcggggcgctggggcgagatggatgcggaagtgattcgttcctacaccacttggatgagcgaaaacggctttactactgctaccttagcggacgtggagggtgcttggactaacgagtacctgcccgaaaagtaggcatcgtcaatagagttttcggctcgggtacctaaaattgctagcaaaactagcaggtatccgagccgaaactttttggtccttagtcctgttgcggattagctttctggtgccgctgagagtaccaaatcgacagcaacgcggtacctacgaggaccactaggatgtagcccatcgaaaagccaatagaaggttcggggaccacctgcgcccatttttctattcccaggaagggggcttcgtgagcggcgtggataatcagttttaccccgatgaatcccaggattagggccaggccgtaatgtaggaacgccaggcgttctaagagcccatctacgaggaagaacagttgccgcagccccatcagagagaaagcggtagcggcgaaaacaatgaaggggtgtttagttaggccaaaaatcgcggggatagagtcaaacgcgaacattagatccgcagatccaatcgcgataatcaccaagaacatgggggttacataggttttcccgcggtggcgatagagcagttttgcttctcggaagccttcggagaccggcagtacccgccgcaccagggtagtgaatttattttcctggtacccttctgcagattccccctcgtcctctttggttattccttcccgcgcctgactgatcgcggtgtagatcaagaacagaccgaagaggtaaaagatccaggcgaactcgttgatcaaagcggcgcctatcaggataaatgctaggcgcagtaccatagagatcacgattcctagcatgatcactttttgctgataggcgcggggaactttgaaaccattcaagataataatgaatacaaacaggttatccagggacagcgaccattcggtgatccaacctgcccaatactgtgcggctagattcagatcccattgcagccacaccactaatccgaaggcggccgcaatcgccatatagataccggaccagatagcggcctctttaatagtgggttcgtgggctttgctgacgtgtccgcggaaatctacaatcagcagcgccagaataatcactgccagcaacacccagttccaccagtgaattacctcgtgtccaggggtggcattaagcgcaggcatcagacccatgcagcgttctccatttcgttggcgttgtctatgctcaggtcttcttccgccttttcaggccgaaccagccgggcaagtttgccgtgatgacgactggcctgttgatggaagtactccccttccggatttactttcctattctaacgtgttttaagcgcaaccccgaaccgtgatctggccaatgccgcctctcccaataggtaccaataatcgctagtccggtgagcgaaatggcgctgcagataaccacgaccagccattgtgagaaagataggatctctaaggcaaagaaatttcgcaccaccggaaccgcgatcgccgcgattactagggtgatcatggcgacaactagacctccgcgccaactgcgcagcggctgagacaggatagccagtagccccaatgccccgattgccaatacaatagtggccgccgaagtagctgcctcggtgcgacccaaccacaggtaggcgccaatcgaagtggatccacacagtaaccccgcaggtatggatagctggcccaccctacgcaagaaaccgggacggtaacggcggttggagggcgcaagggctaagaaaaacgcggggattccgatagtactggaagagatcagggtcagatgccgaggcagataggggtagcgaatacctaaaatcccgactaagagtgctagcaaagccgcataggtagtttttgacaggaacaaggttgatacccgctccatatttcccagtacccgtcgtccctcccctaacacttggggcagggccgaaaatttagaatctagcagtactgctttcgccgcggacttggtggcttgggcagcgtttcccatggcaatccccaaatctgcatcctttaaagccagagcatcatttactccatctccggtcatcgccacggttttacccgcggcctgtaaggcttgcaccagggcgcgtttttgttccggggtaacccggccaaatacccgatgtttctccagaattcgcgtgatcccgggggcgtcctccggtagctttcgagcgtcaaaaccttcggtcttaatccccactcgtcctgccaaagcggctactgtctgcgggttatcccccgaaatgatcagaacatttaccccttcttggcgaaaaaagtccaaggtttgcgccgcatcttcgcgcaggcgttcggcgagcactattaacgcgctcagccgcaatcccgatggtatagcgggatgctccgggtcgatttcctgatttttagcctgtgccaacgccagcaccctcgcgccttgccccgcccaggttgcggtttgttctagcgcgggaccgtcagctgccaatataatctcgggcgctcccagtacccaggtatcacccccgctgaccaccgctgaccatttacgagcagaatcgaagggcactagcagcgggttctccaaagctggcggcatagtttccaaatcgctaactatccgatcatagatagctgccgaagtgtcattttcgcgctcgcgagtcaaagcttgcagggcggcgggcgcccctgcagctaaatcaccagccgacactagtttattttcaccggggagggcgaagccgcgcgccgcaatctccccagtagtaagggtgccggttttgtctagacaaagagtgtctactctggccaggacttctactgccggcaattcttggatcagcaccccttgacgcgccagttttaaggaggccgccgcaaagtttatagaggtgagcaacaccagaccttgaggaatcatccccacgattcccgctactgccgccacaactaccggtccgatattcccccagttaacctggttaagtccccccaggttacgaatttgtgctgcccccaggagcacgattaccagcggtaaacaataggtgatgactttcagaatcttgttgattccttcttccaattccgaatgtgccatctggaattttttaacttgcagcgccatctcgttcgcccaagagtggctaccaaccgcgctcacctttacatatccatctccggctaccaccgcggcaccggaaaaaatttcttcgccctgggctcgcgccctcggaactgactccccagtaaggttagattcatccaggtagaggccactggtggcaactacagtcccatcggcaggcacctggtctccccgtcgcaaatgcaacaagtccccctgcacaatctggcgaggagagatttctttttctaccccacttcgcaccaccatcaccgggttttcttgcagaatactgattttttccagcacccttttggccttgagttcgctaatgatgccagtgagggcattaaccaccatcacgatcccaaaaacagtgtctgcccaatgaccgaaaatcaaggtgactacgatacagctcgccagaatcgcattaaacaaagtaaacacattggcgcgcagaatctgccggactgtacgggtagctcgcggggtgaattggttaaccagtcccgcctgcgtaagtctggtgacctcctcttcgctgagtcctgccaaagcgccttccggtagttcgctaagctcttccccactgaccgagggcgttaatgctggttgtgtgtttcccgccgcgggaaagggaggagttagcgcgtcaccctgagtagaggggccgtgacctttttcggtttcgctcaattcgcctcccgcatttgccgtaattctttcttgagatcgcgcacttcatctcgcagccgcgcggccacctcgaattgtagctgccgggcggcctcttgcatctgggaggtgagctccacaattaaatccgcaaggctagcttcgttcttatctgctagccgtgcccgtacatcctgcccggtttcccggcgggtctgcgcatcaggcccgctgcccgcgccccgatatccagtgcctagcaaagattcggtatcgatttcttcacgcgccaacatatcggtgacatccgcgatcttcttacggaggggctgggggtcaatcccgtgctcgcggttgtaggccatctgtttttcccgccgccgctcggtttcctcaatcgctgcgcgcatagaatcggtaacctggtcagcatacatatgtacttccccggatacgttacgggcagcgcgtcctacggtttggatcagggaggtggtcgagcgcaagaagccttccttatcggcatcaagaatcgaaactagagacacttccggcaagtccaggccttctcgcagcaggttaatccccactagaacgttgaagcgtcccatccgcagttcgcgcagcagctctacccgccgcaaagtatctacgtccgaatgcaggtattccaccaatactccccgctccgctaggtattcggtgaggtcttcggccattttcttagtcagggtagtgaccaagactcgctcgttcttttcggtgcgtaccaggatttcttccatcaggtcatcgatttgtcccgcggtgggtttaactacgatcttggggtctaccagcccggtgggacgaataatctgttcgactaccccatcggagcgttccaattcataggggccgggggtagccgagagatacacggtttgcccaatccgttcttgaaattcttcccatttcaaaggccggttatccatcgctgagggcaggcgaaaaccatagtccaccagggtgcgtttgcgggacatatccccgtggaacatggctccgatctggggaaccgtcacatgggattcatcgattaccagcagaaagtcttcgggaaaatagtcgaggagggtgtttggagggctacccggtccgcgcccatcgatatggcgggaatagttttcgatgcccgcgcaagtgccgatctcccgcatcatttccagatcgtaggtggtgcgcatctgcaggcgctgttcttctaagagttttccctgttcatggaagtatttcagccgctcccctagttcctcctcgattccgtctagggcgcgttgcatcctctctggccccgccacatagtgggaggcggggaaaataaacaccgagtcttcctcatcaattacttccccggtgatgggatgcaaagttgccaaagaatcgatttcatccccgaacatttcgatacggatcgccatttcctcgtacatgggaataatgtcaatagtgtctccccgcaccctaaatgtcccccgggtaaaagccatatcgttacgggtatattgcatggtgataaaacgtttaagtagttcgttacgttctatttgcatccccacttctaaggggaccatccgcgccacatattcttggggagtacccaggccatagatgcaggacaccgaagacaccacgattacgtcccggcgggtgagcagggagttggtggcagagtgccgcagcctctcgacctcgtcatttatagaagaatctttttcgatataggtgtcagactggggtacgtaggcttccggctgatagtagtcatagtaagaaacaaagtattccaccgcgttatcgggaaaaagttcacgcaactccgccgccatttgggcggccagagttttattgggctccattatcagtgtggggcgctgtacctgctctaccagccaggcagaggtcgcggatttgccggtcccggttgcccctagcaggacaatgtctttttctccgctgttgattcgctgggtgagctcggcaatcgcctggggttgatccccagacggtttatagggtgcctgcactttaaacggcttttttgcccggcgcagatccagttgctcactcacgtcccccagtctactaggggcgacaggatatgcagttttaagccagccgtctataagcgttaagaatcacgtcttggtgatttgctggatactgccaggcaccgataaactcagggaggtaacgggctgtggcgcagtttggtagcgcacttgactgggggtcaaggggtcgcaggttcaaatcctgtcagcccgacaaatgcgctggtaaaatactgtttagggcaacaggatttccagctaaatagtaaatctactctcaaaaccactctcattacccggaaaattaagatgcttttctccacatggcgggtgttatgggtgggtgattttggagggtgattacagctccagttcattcaccttctgctggacagcagcacggatgcgaatcgcgtctaatacctcctgctcctctagcgtgagcgcttcgcctcgctgagcttgcttctgctgcttgcgcggttttcaccagggcggattgtgacccgactggaatcgcaagatatcaaagtttcaccgcaaagcgtggatcatttttaggtctgatgctcgaagctcatatgttttacccgtgccgccgggccgcacaagcccgttgcggcgtcagtccggcaacacggggctcagcggcagcggttcgggcaaatccagtgtgatactcaagtgtagcgcggggtcggcaaacaccctcccgttggaagtcatcgcgagggcgcgatactccccacccagaacgcccttctgagtcaattcgtgcagcaggggggttcctcccgcaatcagcgcggtagagagagcctcgcaactcatcgcgtcaggtcccaccacaagtgccgcacaaatatcggtaaacgcgagctgcccgtccagaccgcgaatgtggctgcgcaccagactggggacaatctgggtttgcggcagcattgaattagagagggactcgttttctatctgcaggtctcccaagaattcccggcctgtccagggagattgcactctgatgatggcccggcggtccggcgccacaatcgacgaacccccgaaggacaccaagatgtcgctaccccctgattcttgaatgagagaagccagctgcgcagccgcgtaacctttcgcgatacctcccaaatctaggcccccagcccccacaccgtcggtgaggcgagcctgctcgccccgcaactgcagcgtttcgacgtcccagcccaggcacggaaatagtttaaaaaaacccccggtgcgctgcgcccattcctgagcagccccaaacaccgcggcacagtgcggcccgacatctctccactcggtatccaagcggctcacgggagaatccgcccgaaaccgcgacaggtcatcctccaactgcgccaccctttgcggcagacttacccggagaacctccgcaacctggggagtgctgcgccacgatgccgacaccagcgtccccatcgccgcaaaggtaatcgtggtttctcctggtggagtcggcgcgaggtacacgaacgcctacttttgcgcggcttccatagccgtctgaaccgcatcgaggaacagccgatgtgacaacgatgccccggacaccttatcgaccttattttgatccccggtcttctggaactgctgcacataacgctgttcagcgctgatagcggattgggcgcgctggtaaaactccgtgtctatcccgccgctagcggttttcccgtaattttcgtcatgtgccgtcccgtctttgtcatagagacgaaactcagcgtcaaccacctgaccgtgcttaatcgtgaagcgaattttgccgaccgtaccgtcctcttcgggctgcgagctgcccgcgtattgcccgtccggcaaggtcgacgccgctgggtaagacccgcagccactgagggcgaccatgccgattgcgagtagcgcccccgcggtcgctttacgcatcgtttcgtcccttctcaagcgtttgggggtcacatttttctgcggtttgcgattggttgtggacttctctgacgattttcccgtgatccaaaatgatttggcgctgcccttgccgagcaacgttggcatcatgggtgacgaccagcagggtcgtgccctcccgatgcagctgcgaaaagaagtcgataacgatgttttcgtttgcctcatcgaggtttccggtcggttcgtcggccaggatgacggaggggtggttgatgagggcacgagccacgcacacgcgctgctgctcccctccagacagttcatgagggaggtgggtggcgcgagcggacatgcccacccggtctagtgcctccattgcctcggcttcatcggggagggaatggtagtactgggccatcatcacgttttctaccgccgagaggtgctttaccaggtggaactgttgaaagatgaggccaatcttgcggcgacgcaccgcggccaattccagttcacccattttgtccagacgctcgccctccaggtaaaccagtccttcggtgggggaatccagacagcccagaatgttcatcaaagttgacttgcccgaaccggacggccccactaccgagagccactcgccgcgagttatgtcgaggctgacattatccagcgccgccaactcgccgtattttcgagacaccttctcaactcgataaatcaattgttcatcattattatctgccatagcattctcactctccaccaagaacatttataggattaatccgggcaatacgtttagccggccacagagaaccgataaccgctaccgctaccgaaaaaacaatcgtgaggactaaaattatccagttaatttctactcgtgccaggaaaactttttgcaatatgtaatcggccagaccgattcccagcaagacccctaagaagcctccgaacagccctaacattatcgattccccgataagttccgtgaatacgtccttgctcaaagcccccaatgcctttttcagcccaatctcgcgagcgcgttccgagacaatcgaactcagtgtcgcggataccgcaatcagcattagcgcggaaataataatactgaccaaccaaattaggttgcttagagtatgggcaatgcgggtttcattttgggtagttcgacgcaccacttcagcgtcaaccccgttgaccttttttccgatggttttcgctaaagcgctcaattgggaagtatcacctttcagtgaatattccaccaaactgtagccatcggcaaccccacccatagcggtgtaactgtccgggcttaacaccgccaggtcgtcctcggggccgccggtgcgcagcagcccggagatttccagctgtttgccagcccggttgtcatgccccgaatcgtcccccccggtgttttcccgcagctgcgccaccttgaggccaatcaggtcaccgacgtgcagacggaatttttctgcgaggttcacccctaacaggatctgttcgctgccctgcggcactttcccgtcgattgaccagtagggtcggactgaccgggcgtcggcaaatttcgtcaccatgagggggacgggctgctgaccgtagagcaggttaccgtaactgtagccggcccgccccatcagactctcgccgcactgccggtcgatggcagacaccgtttcccgagtaattacattggaaccttgcggcaacaccaccaggtttgccccaaacgaacgcagttccttagcgatgtaatcgggaactgtcaccgccaccagccccaacccggacaggatggaggcacccattgcgattgccagggaagcaatcataacccgggagaaacggtgcgcaaaggctttccaaatgatgcgcacgaacatgcgtttgtgtgagttcattcccgcctactttctgtgcagaacccgcgcaggttgcaaagtcaccagcgcccggatggaaggtaaacagcccagcaaaaccgtcagccccacgatgaccgccatcaaggggaaaaccactgggcggatattgatactgaccccaaataccaggtgtccgaccagttgggccagaccgatgccgcccacacatccgaacgcggccccgaccaggctcacgatgaaggtttccgtcaaaatcatcagcaccacaaacagattacgcgcccccaaagctttcatcagtccgatttcggcggaacgttccatcaccgaggcagtcaccaggttagcaatacccagagcggaacccgccatggccaaaatcgccaccaaagtcataatgagctgggttttttccaggatcgcaccctcactgtcggcgatttggtggacgggggtggctacggcgttagtcatgacttcctcaatctgataggcgattgaggacgtgtaagcggtgcagtaccaggtttcccagtcctcaagagatagtgagctgggatcgcgggcagcgcggcgggacaagtcattttccggcgtggtgatagcacgcacctctacccggtcgacctggcccggacgacccgagaggctctgagctacgctcaaatccgcaaacagttgccggtcttcattggaaccggaagtaaagataccgctgatagtcaaagttggactgggtgcggagccagctaatccgggcgggggtttcaaggtcagagagtcccccagatgccagccgttttgctgagccagtttcgttccgaccatgacttcatcggcagcctttggccagttgccttggacttcccaccagtcgcgcatatccgccatgccggtatcgactttttccccagtggggatggctagcttcttgcgaaaccaggtcccgactacgtcaatgtcttggcctgaggaagcagccttggttcccaggaacggagcgaagttttcgatgttgtaagcccaaaatatggttttcagttttgccagctcggattcctgcaacgctccggactgggaattcgccgagctacccgtatcctcgaaatcatagagttgggaaactacggattttccttgcggtagcacttggatattggcaccgtaagagccaagttcctgcttgattttatccccgacatccagcatgaccgccagcatggaagttgtgagacctgcccctaataaaatcgttagcgcaatcatgaggcgtttaccgacctgccgacgtaacgccttgaaaatcatcctgaaaaagaacatggaaacttataccttagagccttagattattttggttttaaagattttggcgtgcccactcagctcgtcagcaaaaaaccgtaattctttcgggcccacttcatacttaatcggaatagggttacagccaccgggaaagccaatagtttgaatattcatcatgaccccgcagcgccggcaaatgactttcccgccgtcttcgtaataaccggattcgccgcagatttcgcaggcatccagaccgcaaccgtaggctacggcgttcttttgaatgacgatgaaacgaacttgcgtcccgtccttggtcacgtaggcgaaacgatgcaggtgtccatcagacaccagctcccgactgacggaaaccacatttcctttcaccgtggaaggctctatcggggataactccggaacagtctccgccacgcgcctgccaacggtcaaggcagaaacgaaaacaaccgtgccacccaaggccagctctaaaaagtgtcggcgagtaatccgatccgctttctctaaacgggcttcggggccagaaacattgacggatttggaaccgaaccaaatggcgatgatgccaggaatggcggtcagcaccaccagggccagcagtatgacggtgttggcattttgaatccacaacacgagttcaaagatggtccgtgagcgtggcaggaaaccacgtatggcgagttgttgatacaacagaatggaacgcggaccgataactaccaaaaataccgcggtagtgattgccaaacgcaccatggcgggaaccagcctggtggcgcgcacgtaggcccagccggcgatgaccaccagcagcgacccgaaggcgaatccagaaaagcgcgccagcgattctgtttctaacggagaggaccccatcagcacaatttcgtcggtagaaaatgcgtattcaaagccgaaattgatgatgatactgacggcagtcaacagcgaggccaccagcagcgccctatgtttagcgctctgtttaatgtcatagaggtcggcggcaccaaaccaccaagacattcccaggaagcccagcgagcaaatcagcatgactggaaccagatagaagttcatggtcggaacatctatcagattcgtgttcagccgaagccatgccagtgtcgccgccgctagggctgccaccaccaacaccacggtggtaatccgagccacgactcggcgttccatcggggtgtgcggtcgcgttgccagcaagattgccagcggcacgaataacggcagcccgtagcggagggcgacaacaaataacttgagcaatgaaacctacttagagaacctgcccgtcccactgccagttcttgaactcaaacttcagcggttctttccagaaacggcccttgaccccggaggaatccttacccgtgtgcagcatgaacttgtcttccggagaggggatggtgatggtcacatcgtacaggccgggcttgagcttgatgttgttaccgtagtgaggaccgtcagaggcaatcatcggcatcatggtgcccaggtcagtttcctcaccggtcttttgatccttaactgtaaccttcatatcgtccaggtaaggcatgaaagtatccgccgggtacccgaattcttctgccttcttgttggtagaagcatcaatctcgaagtgcatatcggactcggaagccggaggcatcttcatcgagccgtgctccatatcgacagcctggaaataaacaacgtttacattcagcggcccgttggtttgttcgccagaatccccaaccggaatttccttgatacctacaacattgggatcgctgggcttttccggctgcttctgctcggtcgccgacttggattcctgcggcttagcctgaccgcccgacgaagttccgccacagccgctgaggctcatgcccaacgccaggacggctgccaaagccagtagcttctttttcattattcttcctttccgctgttcgcttcgacagcgtcttttttatcttccctcgaagagttttcttcgaaagctttatcattactttccgagataggggtgtcggaacgaatctcggagccgcccgcctcgggctggtcagcttttgccttgcggagttgcaacagagccaagactcccaataccgcggcggtaataatttgggcaccgagggtttccgcagtgggatagattcccaggaacaccacggtaggaacgccagacaccatatgtgccccgaccaaagcagcctcttgcagctctttaatcgccccgcccacgatggctatcgccagcaacgccagcaatatcgaagtccacttaaagaaaggcttgagcggcaggcgtaccccgaactgccacactagcacgaatagaatcgcgaggatgactaccgccgttacgccacccgcaacgataaaccaataatcgctgtgtgttttcgccccggagacaatcgggtaaaagaacaggatggtttcagcaccctcccgagccacggtgaggaaggacacaaatgccagggcaaaaacgcctcccgaagcggttttttcgcccgcggtggccttaatatattcctcccagcgtttgccaccggacttgctcagtatccagttagacacataaatcagcatcagggcggctgctaggccggtaatcccctccagcagttcctgacccattccgctctgcacgctggcgctgagctgcccaaacagaatagccagactgatggaaatgaccacggcgataaccacgccagctaagattccccgcagctggtcgcgccgccccgctttcaacgcgtaggtgaccaacgctgccacgaccagcagcgcctccgcgccttcacgtagcagaatcagaaaagcggaaaagaaaccggcaatccccagcggtcccgtgtcctgcgttttcgagtctaaaaatttcgcatcctcagccagcttcgcaatcaggtccttgccaagtttttcctgttgagcctggtcacgaccgtctttgtagccctgtcgcaagtcactgaacatgccctcaatctcagtcacacgattgaaacctttgtgcacaatggtgttgttttcaaacccgtcagcttcgtaatgccccaggtacgcttcggtagccaaggtgaatgcccggtcggcttgtcccttgacgtaggcgctttgggcatcggtgataacttgcgcaattgtgtcggcaaccctgctccactgatccgccaccttaggggctttgaccagcttagttaccgtttctgtgagcaggtctgcgactttgtcgctgtcttctcgcagtgcctccgggctcgcaccgtcacggctgagattgcgtaagttcaatagttcggcgacaaacttatcgtttacgtcacgccccaaagcatgtttgacctggtcctccaggccgctcgtctggtagttctcatagtaggcttgacgaatcagagtctggaccgcgctcggatcgccagcttcgggaaccgcggcgagcttttcctgcattaccgacacgacctcagaccattcacccagatcggaatcttgggctgcggccgcgctagaccagaccacccctccgaaggctagcgccaccaccaaagcggaaaaacctacgataaaccgcagtcctcgtgcccacagagaaggctggtttctggttgcgttcacgattctctcaacttctttctaaatcaaatacataacaaggctacaaataaacaattaacaaggcaagccttaccttatagcaaatctagctattaaaggctgattctgaacaaaatcccctcgccctaccacagctcctccaagtggccgtctagcatattgaacctacggttgcagtattcataagcggccgcgtcgtgcgtgaccatcacgaccgcgctactgccttgtgcgagctcgtgaaatagccgtagcaccgccgccgtgctgtcgtcgtccaagtcgccggtcggttcatccgccaacaaaacttccggttgggccatgagtgctcgggcgatggcaacccgacgcatctctcccccggaaagttctgcgggccaggcgtgggatagatccgcaatgtcgagcttttccagcaaatccaacgcgcgattgacaggcaaagaccccacccccaccggcgacgatttccccgacgaccgcccttttgaccgcaaagtagcaggcaacaccacgttatccaagacgttgagagagctgaccagggtttgctgctgcgtaatcattcccagacgaaaccggcgcagctgggacagttcccgatccgagagatcagacagatcctctcctgccaccagaaccgttcctgagctgggacgcagcaaacccatcatgaggttcagcagggtcgtttttccgttacccgatttgcctgaaacacccacaaattggccggcgtcaacactcaagctcacactgtctaccgcgttgaactcgcgtccccgccgcgaaaacttcttggtcacttcgcacagttccaacaacatctattgcccctcccgcacgacctggtaagtttcttttcgcagcaggcgaatcgccgagatagcactggacaggacggcgctgaggcacaccgtcaccaagatgagaacgcccagagaacactggctccacagatcgctttgcagatagggctgcttcaaagccctttgaatggcatcgccaaagggtcgcagcagcgccgcgctgagtcccagccccagcacgccacccgtcaggctgaccagcagattctctttcagcaacattgcggtcagcatccgcttggtggcacccattatccgcaacgagcccaactctttgctccgagacatgacgctgacccagttgaccgtcaccatcaccgccaacgctactgcccaaaagacagccagaaagacctgcagggcgcccacaatgtgacccacaccctccttgagccgggaactaatcccgttcgcagacacaaagcccaagcccttcagctggggagatttagaaatatgctgcgccacttcctccggggcgtaaccgggcttgacttttaccatcactgcggaaacccggtgtccaatctcatctgcggacaagaccggatgccccaccttttcagcttggcgcgccaggattttcgtggtcgccagattggcaaacacagacgaatccaggttcgtgcccgtcggcgccagccgcgcgcttaccgggaattcatagttaaacaggcgaatcttgccctgggcattaatctgaactttggagcccgcgaccagctcaccgtcctgcagaccacgtgaataagtggcttgaatccagggtttgataacaaagtcggtgtccggatcaatgccgataatctgcagccgcacctcgcagcaactcgccattagggaagcaatataggtttgcgtggtgacctgttccaccccggcaacattggcgaccgaatccgaaacgtcatctggcagcaaaaacccgctcggttttcccccgcagaggtaaatatcctttgcggattgctcaaactgggaaggcacaatcattatgtccgcccccaagcgttccttgaccgatgacaaaccttggctgaggttcagcgaaaccatccctgcaccgaacgttatcgcgctgagcaggactgccaccaggaacagtcctaaactgcggtaacggtaatatttgagattacgaaaagggagtttaccccaggttatctggctgctttgcattgcagtttatgccgcagctttctgaagctccgggcggttcctttgatccaggaatatcgccgcaccgactgccaggatccctatacagctcagcgccaacagcgtgggcatcgcgtaaacattgcaagacatttcctcgtttttgcacgttccaataagcacggtgacaatcgaaatttccagcacatagatgagcgccgcactcaggttcaaaccggtgcgaatctgggagttcataaacaatgccagcagcccaatgaccagcaggaggattccaatccccaagctggcttgagcggaccagtagcacgccatatgttgatgagcctcacccatcgctttgccagcctgccccatgtggttcatatggtccataccaccggagcctttcatcccggacatatgttccttgccggagctgtgtttggcagcgaactcgcaaaccggcgcaaaagtccgcggcgcgatggcaatgagcaggcccaacactacggtaggcagcgaaccaatgattctatccttcatgcgatttcctccttaagatttaacgacaacgccaatcatcacacagctcaaaataattagcaaggttagccttacctaattagaaagaaaatatcggagggtgtcaggacagtgcccggaggctcaaacgtatctacgatacccctgccacccccttagaccgtttgcttacccccgggatactttcaaggacgcaaatacacgaactacgccagttgcgtgagatcactaatcccgctgaactcacccgcgatatcctgcgctatcaaagcatcctcaccggtctagccaaaaccccgaccgagcaactactagccaagacagaagaaacacgcgagaaacgaaaaacaaactcaccatcggcatcaaaacccacgctgccgaaaaagtttcgcgctcaaattggcatgagacaccacggggtcgcaggttcaaatcctgtcagcccgaccatttatttttgctgctagtgccgttttatgggcagctggttatgatagaaacatgactgagatttctaatatcattcacggccgttggagcccgcgcgaatatgaccctgactttcccataagcagcgaggatatgagccagcttctagaggcagcgcgttgggcgccctcggcaatgaatgctcaagaatggtggttcgtgcccgggattcgcggcgataaaaactacgagattctgcgccgggcagtagccggtttttcggattgggcgcttgatgcgtccgggctgattcttaacattcatcaggaatatccgtctcgccacggcctagattttggcccctacgacttgggtagcgcggtgcaaaatatgttgctgcaagccgaagtcatgggactacatatgcgcccctttgccacttttgatcgggagctagtatgccgggagttccagatcgccgctccctacgtgcccttcaccatgtgcaccgtaggtaaagaacctgctgggctcactaaagaccgggaacgcaaaccgcttgatcagctactttgggaaaaccaccaggcttagccgaagccaacggttaggtatagcccaaaatactttgaaagaaaaacaggttcccccgcgatagtttcgcgggggaacctgatcgcttggtacgccactatagaaaactaggtttctaagggcgctgcaggcaccctcttaagcggccgggcgcagttgcaagcccagatactgggcagcgcgagctcgcagagattcatctgccagagccgcgatggcttcacgcacctgacggttttggctaacgtccgcaaaccaagggctgatcgcatcagagattgcgttaatcagcagattgtttgcttggcggccagtgcctgcttcgacaatgttatatttttccatttttgatactccattcacttcttcttctcacggggttggcgcattgtccgcaccggtaaccccggggttcaaaaagaaccctgcctgtttaggtcaacctcagcacaccacaccggaagtacacagtcaaccaaatttccgagaaaacccgaaaacttcaacaagtgttaaaccttattttaccatctgggctctgtcaagcgttgttagctatttcaccgcgcgccagcagtaaagataatgccgcaacgcaaaaacctgggtacaccctcggaaaaaacatattacaggctaacggtagtcgttttccattcccaccgtatgaatccgcatcgagttagtggatccgggaacccccggaggcattcctcccagaataattacttgatctccgcgtttggctaaaccttgggcttgcagcacctggtcaacttgccaaaccatgtcatcggtgtgggtcacataaggaacccggtaagtgtgaattccccaagaaaccgccaattggttacgggtagattccaggggagtaaatgccaacatcgggatgggggaacgcagccgcgacatggtgcgcgcgctggtgcctccttgagtgaaggcaatcatgaacttcaggtctaacatttccgctgctcgcgccgccgcaatcgaaagcaccccggcacggtcatggtcgtaagtagttagcggggcgatccgatctcccccgttttcctctacattattaatcaccgaagccataaggcgcaccgcatcaatcgggtaggcccccaccgaggtctcccccgacaacatcaccgcatcagcaccgtctaagattgcattcgcacagtcagaagcttccgcgcgggtaggacggggattatgaatcatagagtcaaaaacttgcgtagccacgattaccggctttgcatagcggcgcgccagctcaatcgcccgcttttgcaccagcggtactgcctctaagggcatttctacccccaggtcgccgcgcgccaccataatcccatcaaaagcctgcacaatctctaccagacgctctacagcctgcggtttttcaatcttggcgataaccggaatatggacttcctcttcttccataatccgctttacatccgcaaaatcatcggcactgcgcacaaatgatagcgcaatcaggtcggctccttgctgcaaagcccaacgtaaatcatcttcatctttttcggacagtgccggtaccgaaactgcaactcccggcaggtttagtcccttgtggtcagaaaccacccccggcacttccacctcggtaactacatcggtagcggtaacttgctttacccgcacttgcacattgccgtcatcaatcaagaggacgtctcccggggtgcaatcccccggcaaccctttgaaagtagtacccacgatttccttattccccggcacatcccgggtagtaatcgtaaaagtgtcaccctttttcaaggtctgcggaccggtggcgaaagtttctaaacgaatcttgggaccttgcaaatccaccagtaccgcaatcgctttaccggtttgcagcgctactcgccgaatattagcgatagtagcttccgcttcttcttggctgccgtgcgaacggttaatccgcgccacattcattccggccatagccagtttttcaatttgcgatggggagttcgttgccggtcctaaagtacatacaatttttgctctgcgcatgtttctatcctagctagttcaggagttctttccacctcatcgaggggataacttgcatttaccagtgtcaatgtcactactgtgagattgacttagcctcgccagcctcctccggcttttcctctttatctggagccacctgcaggcgagggaagttttgcctatagcaccacacggcaatcagaatccctaaggcaaacaccaacagcgaggtccaggcatttattcttagccccaagaactgatttgcctggtcaatccggagattctctatccaaaaacgccccaggctataggcgcaaaggtagaaacccatcatcatccctccccggggatgaaagcgccgctcaatccataaaagcaccgcaatcgccgccaggttccagagcatttcgtagaggaaagttgggtgaaatgtcgcgtattcttcaaagccaagcgggcgatgctgcaaatcaatctgcaaagcccaaggcaaggtagaaggaccaccgaaaagttcttggttaaagtagtttccaatccgaccaaaaatttgtcccaccaaaatggcaggcgctatcgcatccgctaccggcgcgatttttagtttccggtgacgaagcaccaggcaagcggtgatggtagccgcaaagacccctccccagatagccagaccgccatgccagattaaaggaatctctttagggtcaccggtgggaccaaaatagtcttgccatttgcttaagacgtggtagatgcgggctcctataatcccaaagggaatcacccaaagcgccaaatccactattacatccgggttgccgcctcgctgcttatagcgccgggaagcccacaggcatgccaagaaaataccaaggagaatcgcaaaagcataagcccgtaggggaatcgggcctaaataccagacgccctgggagggagagggaataaaaaacgggttcatcccatcactttctagtcgtgtttcttttctcgagttacccgcgacttgcgggaagtagctagcgccggatgcgccccggccgccaccatttcagccaccaaggattgcggattatttgacattaccaaagccgaaccgattaggactgcatccgcgccttgctgggcatagttaaaaacatcgtgcgggccggctaccccagattcggccacggccactacttgctcgggaatcacatccactatttgcgcgaaagtatccatattaaaatcaagagtgcgcaggtcttgggcatttactccgataacctgggctccggcttccagagctcggaaggcctctaggcgggaatgaacctcgactatcgccgtcatccccagggaatgtgccctctctactagggaagttactactgtaggctccgcggaagtttgcagaatcaagattaggtcagcacctaacgctcgggcttcatgtacctggtagggggtaatcacgaagtccttataaagaaccgggactgctaccgccgcccgcacctgccgtaaatcctcaatggaaccacaaaagaaattcttttcggtagacaccgagatcaccgaggctccccctgcctcgtaggcacgcgctagtgccgccacatctggtacttcccgcaagaatcctccgccgggagtagcccgttttatttccgcaattaccgaaactgcgccctcagtgcgtagcgcctgaaccccatcttgagggtgaggacgctgggatgctaacttttttatctcggcgaggctaatctcagattcgcgccgagccacctcttggcgcacgccggcaagcaaacgttccaaagcgttcatctgagtatcacctccgagactatgttatgtatttgtcaccttgagtaaaaactctagctactatttgaacgttcccccactagggcaggcagcctcccgccggcttcaaagcagctgcggcgcccggtgtgacaagctgcgcccacctggtcaacttggattaggagggcgtccccatcgcaatcaatctgcacctgctttacatattgcgcgtgtcccgaggtgtcgcccttgcgccagtactgggagcgtgaacgcgaccagaaagtgacccgaccagtacttaaggtgcgccgcagcgcctcgtcattcatataaccaaccattaagacttgcccgctttgccagtcctggattaccgcacaaaccagccctgccgcatcgcgtttcaaacggctagctacctgcggatctaaagtttgttcattcaccgaacttcaaaccccgcttcttttagccccgcttttacctgcgaaattgcaatctccccgaagtggaagacgctggctgctagcactgcgtctgccccggctcgcaccgcctgcacaaaatgttcaactttgccggctcccccagaggcaatcaaaggcaccgccacctgcgagcgcacctgctctaacatttccaggtcaaaaccagttttcactccgtcggcatccatagagtttaaaaggatttcccctgctccccgcgcagttacttcccgacaccactccaaggcgtcaataccggtagagcgggttcccccgtgggtagtgacttcaaatccactgggagtttccactccggcagggcagcggcgggcatctacggagattactaacacttgattgccgaagcgcttcgctatccggtcaattaaatccgggtcagcaatcgcggcagtattaacccctaccttgtcagcacctgcccccaacagctgttcaacgtcggcaactgaacgcaccccaccacctacggtgagcggcacaaatacccgctcggcacagcgctgcacggtttgcaccatggtggcacgcccctctttagaagccgagacatccaggaaggtaatttcgtcggcgccttcctcgctatagcgttctgccagttccaccgggtcgccagcatctcgcaggttctggaagttcacgcccttaaccacgcgtccctgatcaacatctaggcaaggaatcacccttatcgctaccgccatttagccctccttagagtgttctggtctcagtctaggaaactactttcggcggcggcaaaaactgccgtctactggacttaagacagaaccagcacagatagcgaggcgcgccacggcttagttggcaggtgccaatacatccataattaccgccaacgcgctatctccggtggcttgatcagcaggaatgattgccaagattcgggagttggcacgcaaatctgttagctgttgcgacagagattggaaagtacttccccctaaaatctcttgcggaccagccttaccccaggtgtaggcacgagtcttgcccgaatccaactcccacaccccgtattgagccaggattttctgcttcggatctagttgctgccctttccctggcaccaaaaccgaggtaaatgcttctttagggtgcgtctcggatgctgattcaaactggggcaaccctgcagggaaactaaaagttactcccgcctctggcggaatctgcagcttggaagcatagaccgcggtgggcaaaatgtcgataatatctatttccatcgcggtggtgccatcattggcagttgccggacggtgggcaatcacccgggagccttcacgctgccctaccacctccgatagtaagcctgcaggtagagtcgaggcatttgctttaccagcaaataagttagctttacctcctttagagactagcttgccggtcacgccctcataaacgctaaccattacccgcacatcggtattttcctttaccagcggaccttttccccttatggctaggcgcgagtttggcagggtgaagggcatgcgcccttggaactgaactaccggttgttctcccaactttccactaacttttacccgggtggaaaccccgctcatttcttgtgtacgactggcctgccaaagataaaaacctaaaaccacgcaagcagctactgccactatcgcgagcaaagccaaccaccacttcagaatacgggcaggcaccggggtcttcttggcggatacttccgtttttcgagaggggtaacgccgcgctcgcagtgctatcggggataggtgaggacgtttgggcggggcaaggggggtaggttgcgggattctatccccgaaaatagttgcgcccgactctcccttttgtaggtgatcttccggcatagctgccgatcccgccaagggcttttgattcttcatgctcgctcctgtagttcgagcaacagtttatcgaggatttcgccctcacttgcaaaaggatccccgagcatcaccgttggcattttagattcatcaatgcgtacgtgtaaccagtctactgaaacatctctacgtagccgctccgcttcccgtaaaaccttgccccggatatttgccctggtagtgcagggaggataagttttcgcagtcgctatttcttcacgggttagcaattgtcgcatcagtcctgcccgcttcagcgccggggctagaccagccgcagtaatatcgtgataagccaaatcaagacgcgaaatcaccgccgagttcataggaacctggtgccgctttgcactttgctccagaagattcttcttaatcacccaatctatctcggtgtttaccgccccaaagtcttcttcctggaaacattgcagggtccgctcccacagttctaaggggtcaaaatcgcctacttttatccgttcccgggtagcttccaactccccggcatcacttagagtgttaataacccgctggtagatacggttttgaatctctaccgcatctaggtaaccgcccgccttgagctttaggggagcccgccccgataaatccgcgttaatttctcgaattgcgctcatcgggtcagcaattgccaggtcagccagattaagcgaacagtcaatcgcatccagtaaagcaatcgtcatccccacttttagggcggtagtggcttcaccgatattagagtcccctacgattacgtgcatccggcgatattcgctagagtccgcgagcggttcatcacgagtgttgataatgggacgcgcccgggtagtggccgccgaaatcggatcatacattttatcggcgcgctgagagaaatgatatcctccctcttcatcgattagcccggctcccaccaggatttggcgggtaataaagaaggcgattagcgcatctgccattcccataaaatcggcggagcgatgcagcagatagttttcgtggcacccgcaagagttcccctgagagtcacgattattcttaaaaaggtgaatctgaccgttaataccatcagctgctagttgctgattagtggtggctaccagatcggaaaaaatttcttgtcccgctatgtcttgcgccagtaaatccgttaagcagtcacattcggcagtcgcatattccggatgtgcccccacatccaggtaaaggcgtcctccgttacctaagaacacattggaggaacgatgacggttaactaccgggttgaagaggcggcgtgcagcctgttccgcatcgatggggggacgcccctgaggggcagcacaaataatgccatactcggtttctatcccgaagattctccgcaagggttattccccacccttttgtacgaagccttccacaaaggcttgggcatcggtttccagcacggtatcgatttgctctaagagggcgtctatcgcgggagcgttgatttgtacctgcgcagcttctaccgcctcgtcaagagcatcattcttcccgccgggggcatttatttgttcctgtaccacttttatttcctcctaatagggtaaagcctagaatttttttaccggtttttccttatcgccgcttttggcaagggcgcgggcaaaagcggcggcgtcccctttttcgagggcgcgcatttctgcttcactggcgcaacgcgccggatcccccaggttgaagcgtaaaagtttttcgccccctaagtctaggagcagcgattcccacgatcctttcttgacctggggaagtttagctaccgccatgcctcgcacccaggctcgccctccgcgcggaggctgcgagactgcttgcgatacttctgcctcgctaaacagttgctcgaccattccggctgcgcacagactttcaaaaatccccggctctaatgcagcccactgcaaatccagggcttgcagtttcgggtgatcccattcgcaactaagccgcttacgcatccgttccaagagctgaaattttcctacccactctactttgcgcgccgcctgcgcgcggtcagtcgctaaggaatcgaggatttgctgccagtcggcaagcaaagcggcactggcttcctctgctcccccacgtttttctaacgccccgtcgatagcgagcaggatttccttttgaatctgaagggcggtaagcgctcccgaggcggtttccaggcgatgggtcagcgacaagtcatgggaaactgcccaggtttcctctaccggatcagtagtgattcgcaggtcttccaggactttcagctccgagggattcgcgttttccaggaaccacaagtaagcagcggtactccctaaccgcaggtaggttgaatattggaaacggttggcgtctcccccgataatatgtagccgccgccacttgcgggcattggcatgcggttcatctcgggtattaactataggccggttaaaggtagtttctagaccaatatcattttctacatagtcggcgcgttgagaaatctggaaaccagctttttgggagcgctgcccgatacctacccgcccggctccgcagataagcggacgagtaaccaggaagggaatcaggttttgggcgagttcaaaaaagtctaggtcgcggcgcaaaagatagttttcgtggctgccgtaggcggcacctttaccgtctacattgtttttaaaaagccgaatgtcattaccgctttgggcagctagttgcattgcgcggcgagcaatcaggtctccggccgcgtcatagagcgccccctgcttgggatccaaagtttccggggaagagtattccgggtgggcatgatccacataaaggcgtgcgccgttagtcagtacgcaggcgctcggcttgggcagcgcagtctcttgggcgctggggcgggcaaccgcgcgcactccgggacctgcaggtgccagttgctcgggattattggttagctgcgaggggtcagcctcgcgggggctgagggagaatcctcgcatatcctgcaggggattttcgccctcataatcccaagtaactgcctcccaggggcgcgattgatcccggtaggcagccactacctgagtagagagggcaaccggattggcatagatatttcccggctggataatcccgaactcagtttcggtgcctaagggacgattaatagcgttttcggtcatggtttctcctattgcaggctacgcacgtccactatccgcgtgcctctcactcccagagttcgcgcccattcaccgggatcagtggaagctcccagagccgcggtttctcggatttcttctgcggcggcactttccacgtgactaaaacttaaaccattaactttgccctgattttgcagcgaatctttaatcgcggctttctttgcccgctccacaatggaagcaatcatcgctccggaaagcagcgaatgcgcatacactatttctcgtttaccgttctcataagcaacttcataaatctgggtgcgtggggattcctccgcaagcaaagccaccagtttttcccgcagtttttcccgcccagctgcgggagaagtttcctcctcgatttctactggcacgttatttcccaggtgaatatcaaaaatttgcccggcctgctccaaattaggtcgctcaatgcggacccgtacatccaggcgccccggtcgcagcactgcgggatcaatcatgtcttcgcggttagatgccccaatcacgattacattagaaagcgcctctaccccatcaatctcggagagcaactggggaacaatcatagtttccacatcggaagaaatccctgagcctcgggtacggaacagtgcctccatctcgtcaaagaaaatcactaccggatgctcgttgctagcaagttggcgcgcccgcgaaaaaatcgcccggatttgccgctcggtttcccctacgaacttagagagcagttccgggccttttattgacaagaaataggaggattttccctgggcgtttgcccctaaggatgtagctactgccttggctatcagggtttttccgcaaccgggcgggccataaagcaagattcctttcggggcgctcagcccgtagcgccgataaagttcggggtgtataaacggcagctctacggcgtctcggatagtttcaatctgcttttccaatcctccaatctgtttataggaaacattggggatttggggagcgagcagctgctcgacctctcctctttggactttttgcactgcaatcccgctgcgtgcttccagcaacagcgagtcccctacctgcacttttccaaccaggggagccgctaacggaacgatctccgtatcggtatttgccagccgcaccaggacgcgccccttagacatcacctctcctacctgcgccaaggtgccggtatggggataggaaaggattttagaaaccaccatttcctcattaactaaaacttctatcccgacctgtaaatgttctgctttcacgtccgggtgtactcgcaagaccatcggtttcccgttcaaaaacaggcgcacctgaccggcgttaactggattttcggcaatcactgccaccgtggcggggggtttacctagatcagcaagctgttggtggatcgccactacctgttcgcgagctgcccccagagctgctgatagccgcttatttttcccctttaaggaaataacttcgctttttagcgcctgcaactgctcttcattagcatccggcatgagtttcctttccctaaagctctttcagcctattagttttgcccgctagctgccgcaagtgtccaaggtggcaaacattttaggagggcgcacccaagctagtgtcgggctcaggcgggggtgaactgacttcagatctattaccacgtacccagtattcggcgcggttcactaggtcgcggcgcacccggcgagtcttcctctccgcagggttgcgttgcccgacttgtacctcttcccagttgttttccggattccattgccccccgttgattttcgccgctttagtagcattaccgagttttttcggtcttgcggattctggcgccaaagtgcggcaagtaaccaagaagccggtgtgtcccaccatctgatgttccggtcgcagcgctaacccctcggtatgccattgtctttggatagtttcctcgctggcagtaaacccataacgcccatcacttctaagcgcctctaccagggtagacatctgagtaacggtagtaacgtaacagcacagcacccctccgggaaccagcagcttatagagggtatcgaggtggctccaagggtctagcaggtcgatgacagcgcgatcaaaatagtggttgccgtaaatattttccaggttgatttccccgagggagccgcggcgtagctgccaggcaggatggggctgagcaaaccacaaatccacgttcgcctgggcgatatcggcgaagtcttctcgttcttctagcgaaaccaactccccggtttccccgatcatttctaataatgaaatcgtgagcgccccagaacccgctccacattcaaaaacgcgagcaccagcgaagatgtcggcagattgcaggatttgagccgcatccttcgggtagataatggcggcacctcggggcatcgagagggtatagtccaggcggcgcgggcgaaaagccaagaattctcgcccttcccgggaacgaatcagggtaccttcttctcgccctagcagctccgccaaagcgaaagaagctttcgcagtgttaaaccaaccattttgggtgatagtgacagtatgtaaatccccggaggcaccttggagctgcacccggtcacctacccgaaaggctcccctccggcgcccgagggcaccccttcggcccgcgtccgcttgtgcctgcgcatttgctggttctttgtgagtcatcttcctaattctagcggttattagtttcttcaggcacggcgccctcaccctagaatactgttatgagttcttctaaacgcgccgctgccctttccccctctagaatcggtacttttcgcaactgtcccctacagttccgtttccaggtaatcgataaactccccactaaagaatctcaggtacgtcagcgaggaaccttggtacatgcggcgctggagcatcttttcgacctgccagctccagagcgcactttttccgcagctagcagcaaaatggaagaagcttgggaaaaaacagttagcgaaaaaccggatttactgaccgaacttttcgaggaagacaaaagtgaagaaaaccagttcttagaaactgcccgccagctgttagctaattattttcagatggaaaaccccgatcgcctaagccccgcccaccgagaaaaatatctgcgagttactgataaagagcgccttaacctgcatgggtacattgatcgggtagatatttctcccaccggcttggtgcgaatcgtggattataaaaccggtaaagcccctgccgagcgctatatcgccccctatcagttccagattcgtttttatgcgctgctgtggtatctaacgcaaggggaactgcctgcccgcctacaattactgttcctaaaagaccgccaggtctacacctacacccccaccccggccgatatcgacgccaccagcgaggaaatcctcgcggtttgggaacaaatcgctgcccaggcacgttcgggttacttcccgccgcgtcgctccccgctgtgtaattggtgcgactaccgcgcttactgcccactcatggagggaaccgccccggagatttccagtgagggcgtggcacagctgcttactgtccaggcagatttagaggacgaaacatccctttaagccaaaagctctttaacatcctgtaggctcatctgggctaccgagctaaaacgtgccgcggagatttcaggaatatcccttccccctaccaacgctaatcttgcccccgcgtccttaccggaggctagtccgggcgcagaatcttctactaccaagcaattttctatcggtacttgcaacctgcgcgccgccagccggtaggggtcgccaaaaggtttttgccgcatattcggctcggtgccggtcaccatcacttctagagaacctgcgggggcggtggcgcatacctcgcgcaccaaaatttcataagaagctgacaccagagcagtgggaatcttagctgcagccagttcccttagtagttcacgcgcccccgccatccagggaactccttggtgaatataaaagtcatgcatctttgaaatcatcatctcgatgacctcgtgaggtgatagcggcagatttttgcgctcaatcattatcgaggcgctattaaccagggagtttccggttaaggcctgcccgtcctcgtagctccatacctggccaaaatcagcagctatctcctcttctgcgcgttgccagagtggctcggaatcaattaaggttccgtccatatcaaaaagaacagcccccatgatcctcctttatttttaagcgaaagccgagagggcgcccacggccagggcgactcctaccgcagaccctagtagcagccggtagatgacgaagggtgtgaaagttttagtttccagcaggcgcatgaaccacacgatcaccgcgtatcccacagcgaaagccaccacggtcgcaagaatcgtagccccccaacctacagggttgtttcctaccgatttagcggcctggtaaaagccggaagcaaatactgccggcatcgccaataagaaagaataacgggcagcagctacccgggtaaaacccattagacgtccggcagtaatagttcccccagaacgagaaacccccggtaccagtgctaacgcctgtgccaagccaaagaggattgcttgcccccaagagagctgatccagggttttttctttcttaccccaacggtcggctgcccctaagaacagggcgaagacaatcagcatcaccaccgtgatccacatattgcggaactctttttcaatccaatcttggcctagtagacctaagattccgatcggcagggagccgacgataatcatccagcccatccggacatccggatcggattgattaactccgctgcgctcgggggcaaaagcttggaaccacttgcccactatccggctaatatctttccaaaagtagattacaacggcggtttctgtcccaatctgggtaattgccgtgaatgcagcaccgggatcctcaccaaaaagcgagcctagaatccgcaggtgggcagaggaggaaatcggcaggaactcggtcaatccctgcaccagacccataatgatggcttcaaaagtattcacgaccacctagcctatcgccttcgcggtcgatactcccctcctacctaggtgttttccctcacgcctcacagttattacctcggtgctcccttttgccggggttgccctactccagctagccgcgcttagcgactttgcaacttcgatcgaaaccgctcatgcttctccagttcgctcctattttctactcttacgccgtgcctgaaaacttctgcgacccttgccccttagcctggaaatatggaacaaagaagattaggacgtaccggacttttagtttctagcctggggttaggaactctcacctgggggcgagacactgacctggaacaggccagcgaacagttaagaatgttcctagatgccgggggaaatttactggataccgcttccacctatggggaaggagaggctgaaaagctgatcggcactttgctagatggtgatttttcccgcgatgacctggtgatttgttctaaagcgggggtgcgcgccggggatcctccttcggtagatgcttcgcgggcgaatcttttgcgcggcctggatgagactttagagcggctaggtaccgcctatattgacttgtggtacgtccaccactatgacccgtttgtgcgggtagaagaaactctaaccgcgctagagatggcgctgcgttcgggacgggctcgctatgtgggggtatcaaattatccggcctgggcaatggcggagctagcggtaatgctggggcaagatcgctacgaggtagctgcggtgcaaggcgaatactcgctacttaaccgccaggtggaagaagaagtgttagcggcagccgagcactttgactctagttttatcgcctggtcgcccttgggacgcggagttttgaccggtaaatatcaaaccaatattcccccggattcccgggctgcttcccaacatttgcaggggtttgttgccccttatctttcttccgactatcagccgattatcgaggctgtcttggcgggggcagaaggactggagtgggatcctctcaaactggctttggcctgggtcaaggatgctcctggagttaccagtgccctaaccggggcgcgcaccgctgggcaattcgcggcggtactaaaagctgcagacgcgcatgttccccaccagattcgggtggccttagatgaggtaagttcttagagcgaatttagccctcgtcgtcttcgtcgtcctcgtcgaagtcatattcgtcgccataaaggacttcttcggcttcatctagatcttcatcgctatcttcttcgtcgtcctcgtcgaagtcgtattcttcatcttcgtcgaagtctccgtcgtagtctgcggattcttcctcttctaaaacctggtctacgtggtcaaaaagagtatcggagtcgatatcttcatcatcgaaaatatctaggggaagatcgcatcccagctgggaatatagggcttcatcataggcggagaatgcggattctaatttttcacccgccaaagctacctggggatcagattcgggatcttcagcggcgcgcgcggcctccagatgagcttgcagcgcccccacgaaattatcgaaggtcacttgtaaacggtcagccacgatacactacccccttggccttagagcaacctgaacgcttagggcaggtgaagctgaccgcgaatcatggtcaccatcaggtcggtgcccttgatttctgcggtttcttccggtccgacgatccgcgtcgtaccgtcggggtcaactagctgcgaggcgccaccatcggggcctaacggcaaaatgacccactccttgcccggagcataggttgtcgaaggaacccgcccagaaagttgatcgcgaatattcgcaatcactacgcgggcgtgagcgcgggcagcatctgctcgctttgattctggcacatcggtaatgtcaccaactgcgtagacattttccatgtctttaacgcgcaggtgttcatctaccataacggtgccatttgcatgcattacttgggaatatgacccgtggaggtatccggaagaagtttgcgctccatagcataggaaccacatatcggcttcgataggtaccccggccagggtttcaacccggaaggtggagagcataccgacatccgtaggaggcatgtaagctaagggggcgcccagtaccagctcgataccgcgttcttctagctgtttcgttatggtttcgcgcaaggaatccaggtatccgggagttcccagaatatacggctccttgtcaaccatgatgatcttcaaatcggggtaagtagaggtgagctcaccagcgaattccacgccaacggtgcccgcaccgaccagcatcactcgtttcgcccgcgccaagttgtcgcgggtttggtctaggcgagctttagctaccgaagcctgagaaaccatgtgttttgccgggaaggggtaggtggttcccgttgccaacaccaggaaatctgcctcgataggatcgtgcccggctacataaaccgtacgaccatctacgcgcatacaagtaccatgaacaaccttgccacgttccagcagcctgctgtaaggcataaatacggtgtgaccccacacggaatcgaccgctgccctaagcgccgcagcatggtgcacgaactggtctttttgttcgaccagcgtgacgtctgctacgtcatccaggccacctgccacggttatgcctccataaccgccgccaatgactactactttagccacgctacctcccctttttatctgctctcggtaatacccaaacagatgcgagctaaatcagaccggaacccgctgctcgccacctgtcaggtagcgaacaaaaagttaccaacctaaagattgtttcttcggttttactctaccttacgctatcaaaaagaactactctttcgtaaccatcctactcaggaatagaagtttttaacgcttttttgatgtttggcggaaagaaattttttcctttgagtactttcccgtcttcgcgataaatcggcttgccctctgaatccagtttcgagaggttcgaggcctggacttcccgcaaaacggccggcagtgaaatcccgcattctagagccattccatagattacgtaaaccaggtcggcgagagcatcagcggtctcaatcgtgtcgcgggtaccgtcatcaggcaaggaagaaatggtttcttctaggaggcggcgagcctcggctccgtaaaccgcgccggtaagttcactaacttcctcgtagattaaacgcatccgcatatgcacccgctcgcgatctacctgcgcctcgtcgtgttgaatcggcagaccgtagacctgatgaaactgtcgcactaaatcttctgggcggtgtgggtcgggaatctgctgtttcagttcgggcttccccactggctgcacgttcgcgtcctcgttaatcaaaattttccctttcttttatttctttgccagcaaagtatttttcagttctgccaccgaagtcacccagggcgcacctgggaactcctctcggctgcctgctccccaagacaccccgattacctcgataccgatgttctttgcagcctgatagtcatcttcgcggtctcccaccatgactgctcgcccgagcgaactttccattcccagctgctccagggcataacggatcactccctctttgccacggcgagttagggggttagcaatatcgcggggatcctcggcgctagttccggttttctcttgagtgccggcggtgtaatcaaggtagggactcattccggttccccgcgcaatctcccgcactaattcttctagtttcgaggaggcaaccgctatcttcatccccttgccatgcagctgttccaatagttctttgattcctggaaatagcggcacctgggtcatacgcggccggtaaaagcgccgataaacttctaccgcttcatccaagctactgtccggtagatccaggtatttcttgaaaccaattcgcagcggcggccctacaaaacgtttaagttgctgcggagtttgctcactcaagtggtagtgggaaataacttcctgcactccctgggtaattaggggaacggaatcggtcagggtgccatccatatcgaaaatcacggtctggaaataatttttccccatcggtttgtgtttcttcccttcggctgctgccatttctttgacttgaggatgtgtaccccggttctattgtaggcagcttttgtacgaacttaattttggaggtttagctcctcactttttcgccctcactttttctgcgggctcaaaggtgtgctaatctcactggtgtcctcgagcgcgggtggcggaatcggtagacgcgctagcttgaggtgctagtggccaacttaacggccgtgagggttcaagtcccttcccgcgcaccagcggtttttgcgctatttccctacatcttcgcccctaccatcccggatagtgggtgttttagttggtttccgcaggttttcctgcggcctcaagtgttgcttgcacaaataaatcatcggcttctgctggttgttggtgtcccatccccggaactaagtgcaactgagagtgctgaattaggcgatgcaattcccgaccggcagctgccgggattaccgggtctttttctccgtgcacaatcgaggtcggcactttgatttccttcaggcgttgagcccacggcgcggttcgctccatggcttgacgctggcgctctgtgccctcccagctaaaaccgcgctgccaacaccttgccactaaatcgtgtagtcgcttttcctcccagggatatttagaaccggcgatctctgttatctggtgaaagtgccaggctaggaactggtcgcgattggaaaaaggtacttcccgcaccggttttaccagctgcgtactgctttttgcataggtaaagaacagccctagcccggaaaccaattgggggtaatcgagggctaacagttgggcgattgcccctcccatagagcgtccggtaactgtggccggcgatccgtaaaagcgaatcaaggctgccacgtcgtccgccatatcccgcaaatcgtaagggcagggagcaggcgaggagcgccctacgtcccggttatcaaacctgataacgaagaatcttgcgtccgccaggcgctggcaatagctttcaggaaccgaaaccagttgagccccgtgtccttcgatatgaataatgagcggatcgcccggattcccgaattcttcgacgcagatggttcttccgccgtccaaagaaagcattttttccatgtcctcagcctacgcccgccaaaagagcacccccagatatcccccgaccctaaagtgtggaaaatccactttggagcagaaaggcgtttcttagctgtttagcaaaacgaaactctccccttgcctaaatagggaaagaacttttgggtttttaagtatcagcaagggattttaaggaaagaaatcggaataaccccaggatttaagccttattttcggagaattaaccagacaattgaatatctccattttctaccgctttccccctacaattgggtgagatttgccggcgtgggcgaatcggtttattcgacaaggagtaaataatgcgagcggtgcaaccggccaatacccgtccttctcggcgtaccttcttaaaatggtcagcgatagctggcagcactactggactggtggcctgctccgccccctcgccctactcccccgacaagaacggaaaactagttgcaaatggcaccggacgcaccgatgtggacaaaaccgtctggtcagcctgcacggtaaactgcggttcgcgatgcccggtgcgtttgcaagtaaaagatggtcgggtggtgcgggtactgcctgataacaccggtaacgatgaactgggcagccaacaggtgagggcgtgtccgcgaggacgctccatccgccaccggatttacaatcccgatcgcttaaaaaagcccatgaagcgcaagccgggtactaaacgtggtgaaggacaatgggtggaaatctcttggaagcaagccctcgatgaaattgccgaaaagatgaaggcactgaaagccaagtacggaaacgagtgtttctatatccaatacggcaccggagttctgggttccactatggcttgttcctggcctcccgaagccacccccatggcgcggatgctttccctgtatggcggctacttggatcactattctgactattccaccactaatatcactcaggcttacccctatttctacggcgattgggtcgctggaaacagcttcgatgatgcggcgaactccaagctccaggtaatgtttggcaacaaccccttggagacccgaatgtctggtggggggcaaaccttcgtcacccaagctacgaaacgtaaatccggggtaaaaaccatcgttattgatccccggtactccgaaacctcggtggcgctcggtgacgagtgggtggcgctgcgtccaggcaccgacgccgccctgatcgccggcatgatttatgtgatggtcaaagaaaacctgcaggatcaggcattcttagataaatactgcatcggcttcgatgaggatcatatgcccgagggcgcgcccgaaaacgcctcctatctggcttatttgcagggcaaaggtaaagataaaaccgctaagacccccgagtgggcagccaggattaccggcgttcccgcggacgaaattcgccgcctcgcccgggaaatcgccttagcgaaaccctgtaccatcacccaaggctggggaccacaacggcacgctaacggggaagggatcgcccgcgcagtattcctactggcctgcgtaaccgggaatatcggtttgaaaggcggcggcaccggaggacgcgagggcggacaggctctgccgattacccgaactttcaacacggaagtggccaatccttccgaaaaaatcatttccgtcttcagctggttagatgctattgaccacggtcccaagatggataccttcaatgccggagtgggagttaaaccagaaccgggcgtacgcgccctaaaggtaccggtggatgaagccggtaatcccaccaacaccaagttggaggttccgattaaagcggtcttcaactatggatcgaactcgctggtaaaccagaccggagacaacaacaaatcagtagagatcctgcaggatgacaccaagtgcgaactcattgtcacctgcgacattatgcatactgtcagtgcccgctactccgactatctgttaccgggcacctctacttccgaagaatctgactaccacagcggggaaaatgccaccccgatggcttacggcattgtttcccagcaagctatcaaaccgctctaccagtgcaaatctatttttgatatttgcaccgaactggccgatcgcctaggggttaaagacaagttcaccggaggtaagacccgggaggaatggctgaaagaaatcgttgagaccgggcgcgctgaagaccccactctgcccacctatgaagagtggaagaaagtggggatcgtccgccgcaacgcgggttccgatattcctttggaagattttcgtaaagacccggcggcgaatccgctcagtactcctagcggcaagattgagatttattcccagcgcctagaaaatatggcaaaaaagtggactttcggagattttcgtcctcgcctagacggtgacgaactctgccccatccccgcccacctagctacttgggagggagctgaggatgccgccaagaataagaagtatccgctgcaagtaatcgggcatcacttcaaagcccgtactcactccagttacggcaacgtggattggctcaaagaagcccatattcaaaccgtgtggatgaatccgaaagatgcggaagaacgcgggattaagaacgatgatttggtgttcgtctacaacgaacgcggcactttgcgcctacccgccaaggtcactaccagaattgttccgggaaccatttcggtaccccagggcgcctggtacgatcccaagccggcttcggaggttactccccccgagggtgcaaatccgaagaaaccggtggacgtggccggttcggtgaatactttaagctcactgcacccaactccgattgctaaaggcatgggggttcatactattttggcgcaggtagttaaggcctaggccggatgtggtcgcgttaggtaagcgaggttagcagcaatgtttgggattagtggcagcgagttcttagtgttggcggtggtcgctgccctggtgctaggtccaaagaacgtggcgcaagcacttacggctctccgcaaagttctcgccagttttcgcggctggtctgccaagttgcgacaagaaacctctggggaatttgcggggctaactcccgaagatttagagaacctaaaagtgttgcggaatctcaacctcgctaggtacagccctaaacagatgattcgggaaactatccaagaagaaatcgaagcctgggcgcaatcagccagcgaatccggggaggtgttaaaaaatgccggctccttaaatacagaaaataaagattaaagatagcgaaaataatacaaaaagggaagggcgtttagttgatttcctagcggaataaagcaatcatgcaatgccctaaaaatcacgaaaaataccactattacctgcaagaacagtcaatctcatatatttgttaaaaggcagcaagtggggctgccagagttatttcaacagtcttcgcaaggaggacgcaatggccgaagatgcgattcctactcccggcaggaataacactttaagcgagcctttaactaagaagggcgcgaaatacggtttcgtgtttaaccaaaacctttgtaatggttgcaaggcctgccaaatcgcttgtaaagataagcacgatttaccggtgggaatgtcctggcggcgggttatcgaatataccggtggttcctggagaataaatgaagctgacggaactttccaccacaatgttttcagttactacacctccattgcttgtaatcactgcgaagatcctatctgtgtccatgtctgccccactaccgccatgacccggcgcgaagacggcaccgtctatgtggatcaatctaaatgcgtgggttgccgctattgccagtgggcttgcccctatggcgcaccgcaactggatgctcgcagtgggcatatgtcgaaatgcgatttgtgctacgactatcgcagccaggggcaaaatcccgcatgcgtagatgcttgccccactcgcgccctcggatgggggccaatcgaagccctgcgtaaagaattcggtcaggaagccggaatcgctcccctacctgatccttcgattactcacccacatctggttattaggccgcaccgcgacgcccaagaatgggataagggctccggtattatccaaagtcccaaagagatataaaccgtgaataccgtattcaccagctaggttaaggagcatcatgcatatcggcgaactgcccatgattatctttactactgtcgcgcaaatgtcagtaggggcgttttggattctgggaatcatccagctgattggacggcgcgcagggattgataaatccgcgattgacagtctgaccaatgcgggaatgtacgcggcagggccgctactggttctggggttctttgcggcgttcttccaccttaatgaccctttccacgctccgtttactctattgcatttgggatcgtcttggctttcgcgagaactgatctccggggtgctttatgctctattcggtctgatttttgccctcacccaatggtttaaccgtttcagccggactgtccgtgacgtgttcgcagccctgaccgctctagcaggtttgtcgttggtggtgtcgatgtgcggagtttacttcttcgcgatgaccgttcccgcctggcatacctggttcgtttgggtttctttcttttcctctgccttctttaccggctccctggcggtggcgttagcgctactgaccacttggcggatgaaactgcgcggagccagtgaaaagcacggtgaaccaaagaatgcctggcaaaaactaatcgctgctctgcgccgcgggctatttcctcccggaaaactaccggagggcttaatcgatctgaccaagcggtcgatgcggattactaccgggatagcggccgtggcagggctaattattttagtttcttacgccttctttatgacccagcttggtctgggtagcccgatagaacagcaagtcgctcgaaacatgatggcgcacggctacctgacaatcaggctgatactgctggtaatcaccattttgctgattgcattggtgttgcggaattacctctccaataccgcctatcccaagaaattcttggtggttaccctgtgggtaactttcttcctagctttagctaccgagttaatcgggcggggtttgcactacgaggggctggtgcgtgccggtatcaacacgctcctggggtagaaattaacctatggagcccaaagtactagattcttttgctgctgctttttgcgtcctgggagcgctgcatctaaagcctcccagcagctcggtggtcaaagaatttttatcccaatctagtcagtggccactgcccttgactccccagggtgaggccgcgctgaaagagttacgttcctccctccccaataatccctctgaagaggatgtttacgcgctgtgggcggatcaaaaccagctgtacggaatcactggcgccgcccagctttccccctatgagtcggtacaacgcggcgaggacggcctagtttttgatcaagagactattgaagttcgtcgctactatggggcgatgggattcgaagctccccacctgggcagcgaacctgatgaccatatcggtctggagatggactttttaagtaaatgcctcctaaaagccgccgatgatttcgcagccggtcaagaggaacaggccaaacaatctttaggagtcgcccgtcagttttgcggcgagcatcttttaagctggggacccgatttttttgccgagggcgcgaaactggctgtaactccctggctgcgcggcatttgtatcctatctgtgcaggcgctttctcagtggcagcaggcgctgatcgatgccggctatcagttagacatagctccccgtcaacgccaatctaccttggaagattcttctggggtcgtgcccctagaacttacccgccgtccccactaagaacagaggcgctagcatcttgattcctcgtaaattttccgctttattgcgctggatcagcgcccaagacccgattaacaccctggttattagctgcgaaagcctaccggcgataacggtggggaaaaaggatgcccatctgtattggcaaggctgcctaggggaaagttttagcgccgatctggctgctcagctggtggcaagcgatatcgaaactttgcaaattattggttgttctcagtgtgagcgctccctggaagaaaagctattagcggccaggacgcgcctcgggaagttgttggaaaactaccagcctccaaagaaagcggcgcgccatccccgtgaggtcaccttggaggctgtccccctcccccggcgtttgttgctgccgattgcttctcgcgcacccctagatttgtcgctctctcatgcggggcgtactttccaggcctaccatcttttagccaaagaacaccggatcgaaaatcgagtagctaaacccaccgagtcttcccctaacagtccggcggtagaatctgcatcctcctcaaaggtaaatacccaatatgagggtactagccaagatactgactttttgccgaagtgggaacggatagatattattcatctgctgcgttgcccggattgtaacgcacaggtgcgccagtgtccggccaatgaaggtcttaatctcaacgctgcgggcagtaactggcaacagctgtgtcctgattgccgcctggcagtgcgttactgtccccagcactctgaggcagaaatagctagccaggcttcattagaggttttcaccgcccttaaacaccagcaaaattcggaagaaatcaccgaatgccaacgctgcaagaatccccatccggccagtgagggcgagctgtgtgccctctgcagttaccaagaggaaaacccgttttctgcggccatgccgcaagcggtactaaagactctccctgccgagttacaagagaagctgcgcggggtatagcccgaaactacagaaaaataaaagccgctccctggggagcggcaagagtgggcgatactggactcgaaccagcgacctcttccgtgtcaaggaaacgcgctaaccagctgcgccaatcgcccgaggtgggtacgggatttgaacccgtgtacacggctttgcaggccgctgcctaaccactcgaccaacccaccataccgaaaaggcgccgcacaggcgacgccctctcctggagcggatgacgagactcgaactcgcgaccctcaccttggcaaggtgatgctctaccaactgagctacatccgcgttgcgtatgaaagtatatctggaaagttgtaggttttaccaaaccatctctgcgtgggtctgctcacagccacctctagctggggtttcaggacgcaaaatcccttattagctagcgaaagacaacacagagaaaactcattgaataaatttcaaagcgcacaccgcaaacagggttgatattctctaaatatcaaccaagtcaggattatctctagaggagttacagatgatgggtattttaggtagcagcatgatcgtatttttactgctgctattttttattggatatttcttgttctccgcgatttttatcgtaaagcagcaaactgaagcaatcatcgagcgttttggaaaatatcgccgggtatgcactcccgggctaaacatcaagattccagttattgaccgcatcgccaagatcgtagaacggcgtatccaacagctggatctggtggtagaaaccaaaactaaggacaacgtgttcgtagccattccagtttcggtgcagttccaggtgcaagactcggcggcctcgttctattccctagctaaccctgcccaacagattacctcctatgtttttgaccgggtacgttcttccctttcccagttgaacctagatgaagctttctcttccaaagacaccattgcccaagaaattgagatttctttgggtgaacagatggcgcgttacggtttcagaatcgtgaactcgctggtaactgacattaacccggataaacgggtgcgggattctatgaactctattaacgctgcccagcgggaacgggaagctgcgatccagctagccgaagccgataaaatcaagctggtgaaacaggcggaagcggatgcagaatcgaaacgcctccagggtgaaggtatcgctttgcagcgccgcgccatcgtagaaggactggtagagcaatacgaatctttacgcgatgccggtatcggtgaccaggcgcaacagattttactaatgacccagtattttgacactttggccgaggtagccaagtcttccaatacccaaaccttaatgttgccttctaatcccaccggggtaaccaacacgatggaggaaattcgcacctccctagttgccggtctaaaggctgctgggcaatagcaaaactgacttcagcccgctcgaggggtaccctggtaacggttcagttcccaaagatagataataataactaagtatcgtgaataagtatgacgaagaataatcagcaaaaaccgacgccatcagaacaggatccctccaagaaaaataggtttcgccagcgcagacgccgcgggcgtggcgaagaattacgcgtcctcttagacaaatacgatcgccggatttcccacctcgagcagagcgatcccgaacgagcgcaaatagtagcttcccgcactcaacatttacggcaagctctcgcaaataaagtttctgccgaactagaagattcttcgacacccaaatctgctgttttaggtgaggacgcgagtgtcgcagatggcactagcgacagtccaagtacaaacgctccggcacatgccagtgcttggcgacggggaacccagattgcccgggagcaaacccaacatttgctgcataaagtaccttacccacacggcatgcacccgggactggttcgcggaatcgcgattgatgaacagatcatcaaataccgcaccgataaagtggtgttcttgtgtaccggggctttggtattagctttcatcctttgggggataatttctaccgattccctgcgcactgtttctgatgtggcattgcagtgggtagtagataataccggatggttattctcaatcctggccgcagtgattttactgtttatgctgtttgtgggactttcccgctatggaaatattcctttgggacgcgataacgaagaaccggaatactcttatggctcttggatagccatgatgtttagcgcggggatgggaattggtctgctatttttcggcccctacgaaccaatgatctacttcaccaaccccgctcctcactccagcgctaaacccggaacctatcaggccttaaatgatgcgatgtcgcaaactatgctgcattggggattaaatgcttgggcaatttatgccctggtgggatgtgcgattgcctacggcacctaccggcggggacgggtacccctaatctcctcggttttcgcacccttactgggtcataaattttcccagggtgggattgggcaagtaatcgatatgctggcgattaccgctaccttgttcggcacctgcgcttccctggggatgggcggcatgcagattaggcggggcatcgaattagtttccgggataggcaggatcggtaacgcgggcttaataatcattatttctgtgctgaccgcggcttttattgcttcagcggtttccgggatttcccgcggaatccggctgctgtccaatatcaatatgggcttggctttttgcttaatggcctttattttcttggccggccccacggtattcatcttgaatctggtgccttccaccttgatgaactatctttctgacctattcggattactggcgacctccccctcctacggaccgcaggccggcgagtttgcttctacctggacggttttctattgggcttggtggatctcctggtctccgttcgtgggactatttatcgcccggatttctcgcgggcgcactctgcgccaatttgtgactggagttttactggctcccaccttggtttgcctgatttcattttgtatttacgggggaaccaccatgtatctgcagattcatggagcggatatgcctttgcaggaaggcgcagaagtgatgttatttgcccttttgcagcaactaccgctaacaaaaattacttctttagtggccatgttttgtttggcgattttctttattacctccgcagattctgcctcggtggtaatgggttcgctttcacaacaaggcaaaccagttcccgaccgtaaaatcaccgtattttggggactgtgcctggccggtatcgcggtagtcgggatgctggtagggggacaagatgccctacaggggatgcagaacttgattatcgtggcttctctacctttcgcgattatcatagcggggatgatttttgcgttgctgcgagatctatctcgcgatcctttcaccattaggcgtaactttgagcgttctgccctctccaaagcggtaattgggggactgaagagttacggagatgatttcaagatcgtagtggtgcccacgaaagagggcgagggcgccggcgcagattttgattacactactcccgagatgaccgaatggtatcggcgtactgacaccgagggaaatcccatcgactatgactatgcttcccaaacctacctggacaagcaaggtaacccggtgtactggaatgaggaagaggaaacctacgaggatgccgccggtaacccggttccctgggaaagcgtggaagatacctctaaagacgaggaatcctcaaaagagatcacagccgacactgagaaatagccgctagcgtttctcaccttgctgactgcgccgaggggcactccgcgacgcctagcggctctgtggctgccgtccctatttgctagttgccagcttggcgaggcccttttcgcgcgtgtttttataaaccgcccgccagttgccaagatcccgcagctagtagcgcgatcgatgccgcagggagcagccggcgcacccatagtttccaggcggcagggggctgggtaaaaatctctatatcagctgttcccgatgcctcatctaaatctgcagtcttatgcttagtggctttagcttttaacctttcccaggccggtttggctaaataggtttcagctgatgccgcgaccgcttcctctggcgcagaaaatttatctggctgggaatagatcccttttggagggggcgcgggggcaggtttttctttctctatgcgaggagcgaacgaggaagcgggagccggaaagctgcagtccgtaaaagctggagttttcctgctcaccagcgacgccatccccggattttttggtttaccagctgcctgtggcgggcgatcaatagctttgatttttcctggggtggcagttgaagtattgtttgtcccttttggggatagctgaaaagcatcgttaactaaagcagtattatcgatcccgcttcgctgctttgctcgcgattttagcgcaggttcagccgctagttttaagctctgacccctcttggggaatactgtccttgacccgctggcaagtatccgcggtttttctagattttttgatccagtcgcacttaggcacataaatggacgcactaaccagttttccccatgctcatccttaatcagatgcgggcagggaaaagaagtcttcccgcgcggcactatcaattgtaaaactggcagaagttcctcagttactggaactgccacccagtttttacctgactgttcttcgattttactttgccggtatccccccggatctccagctacttttagggcgcattttgtttccataccttcacccaactccccttttaggtctttgtcacctgattttccacagccgccagtttcatgttccttaatcactgcctggggataatgtctcaatatacgatttacgcattttttcgataggcttagaacatcatggctacacaaaataacccgcagaagaaaaagcactggtggaacaacatcgcggatgtttaccgcgtaactaaacgcagctatccctggattggctgggctatgctggctgccttattggcagtacctctgatagtgctaataatctgcatcctggttcccttcagcatcgggcgcagcatcttttacgtaattgtcggactctcgctcgggatgttgctggccaccaccctgctaacgcgtctggctaatagcgccatgtataagcagctcgagggagttaaaggcaatgtttacgcggttttgcgttctattaaacgcggctggattgttgagcaagagccggtagctatcaaccgcaggcaagatttggtgtaccgcctggttggacggccagggattgttcttatttccgaaggccccgcctcgcgggttgccgagctgctgagcgaccaagagcgcaaatgtcgccgggtcgcaccctcggtacctatccataaaatccagtcggggcagggaaagaatcaggttcccatcgggaagctactgaaaaccattaaccgcttgaagaaagagattagtaaggacgaggttccgattgtggggcagcgtctgcaatctttgcaaagcaaagcctatcgtctacctggcggggtggatccggcaaaagcaaaaatgaatcgccggatgttccgcggaaaataatcgccaaaggttacccttggccttgagcagccatttcaacgctaaaagtagcgtttaatcagatttttcttcaggtgtgcccagcactttatctagtagtgccttcgagggacgcagttcagttacactctcgtcaacttcccattcccctacgggacgcgaagaccaaattttagctgagaagttccccggctcgccctcaaaaactgatagtgaagcatttgaaaccggtttggtggccgccagcgcaaaagtaatctccggagtgctcatataggaccagtagcggatgatcgcgccatgagccactatcactgcacaaccatccgcgcccacctggtcggctgccgctgccaccacccggttaaaacgcgtcagagtttccgcgccgctctccccgccttccattcgcacctgggtatccccctgcatccaggctccaatagtgctcacatatttttctaccgaggccatatcggtagccatttctagatcccctgcctgcacctcattagctttaccgctttgtatccgagtgaggccaaaatattcctctaaaggtcgggcggtctggtgggtacgaatcagattcgaggtcacaattagctgagggtcgggcaagccgagttgctcccaagtttttaccgccgcatgtgcctgtcgctgtccctcctggttaagcggggcacccggctcagcagtatccagcgcgccagtaatattcgcgctagtttgcccgtgtctcatcaaaaccagtttcatagttccctttcttaggagttgtaaaagactctctccataactgtccgggcgcgacgcgcccgacgtaaataatcttcccgcaaatcgttctctttatctggcggataccccagcaggcgcgccaaagcgtgggcaggggcagctgcagtaggcaaatagtccaatttattaccgctcacccggttagttaccagcacatttccgcagcggatccggcatcctaacatccaggcttgctccagggcgctgcggccggaatccgatagcattccttgccgggcagccactgccaaagcttgcaaagtaccagttactcgcagatccgggcaggaagctgccccttgcatctgcagcaattgggctacccattctacatcgctcagtccccctggccccagtttcacgtgcagggatgcgtcttgacctccgggaactcgttcgttttccatgcgtgctttaagtaggcgaatctggcgagtttcgccctcgctaatgggacgctcatagcgcagtggatctatggttttggtaaaacgctccattaaatcctggtcgccccaaaaggcgcgcgcccgcagcagcgcctgcagctcccaaggttccgcccagcgttcatagtagtcgcgcaaggcgtctagggaacgagaaattaccccgtcctcgccctcgggacgcaggccgtagtcgacttttaaactgggcgctgccgctggtcggttcatttcttcttgcagacgagtagcgaacaggacagcaatccgggaagcctcgggggcaggtagtttcgcgttagtccgcaaagaggcagtttgcggggcattccccaagatcggagcaggcacattttctaccgctcccggggcacacaattgcggatcaagtaacggagaatgtaccactaaaagatcggcgtcggaagcataggcggattcgcgtcctcccccacgtcccatcgcgaccaggacaatacgcggtacagcctcctcgtgtgctgcaatttcccgcattatcacttgactgactgcggcgatagttgcgtcgttaatatcgctgatcgctgcctgggaagaaatggggtctaaatgattgattacatcccttagggcgcagcgcaacaattcgcgcccgcgagcttgacggatcagatccactgcggcactggtgtccaggtgacgccgggaaagtgcctccatctccgtataaagttgcttaaaactgcgggtagccagctttttatcgtcgtctagccactggactgcttccggtacatgttccaggcgttccgcgatatagggactgagtgacaagatggtgcataaacggtgggcaacccgggaagaatcccgcagcagtcccatataccagtgggaattcccgatagactccgatagtcggcgaaaacgcagcagaccggcatcgggggaaggcccttctgccagccagccgagcagcaccggcaaaatatggcgttgaatttgggaccggcgagatacccccgcggtcaaagccgtaatatgcccgagggctccgcgagtgtcccggtatccggcgagccggaggcgatcggctgcggcctgcggattcagggcagcttcctctttggagagccccgcggttgccggaagcaggggacgataaaaaatatcttgttgtagggcgcggatttggggttttagtttttcccaatagttagtgagttccccgcttttcccaaaacgttctacaccgagtgacctacctacccggcgttcgtcttcggggttttgggggaacaggtgggtgcgcgccattcgttgcatttgcattcgatgttccactacccgcaagaaacggtaggcatccgccagtttccgcgcggagtcccggccgatatatccgccctgagccagggcatctaaggcttgcaaggtaggccgcacatgcaggctttcatcagtgcgcccatgcaccatttgcatcagctgcaccgaaaactctatgtcgcgcaaacccccaggacctagttttagttcccggccagctttgggaccggggattgattcttctacccgaatccgcatcgcccgggtgtcagtaaagaacccttcccgctccactgctgtccatactaaaggccatactgcctgcatataggcttttcctacccgggaagatccagctgcagggcgcgccttcaaaagcgcctgaaattcccaggttttcgcccacttttggtaatacttggcgtgcgcggctacggtacggcaggtggctccatcttgtccttccggacgcagagctaaatctattggccataggggcatttcgattcccggcccgcagcagaccttagaaattccgatcgctagacgcgaagctactttcagggcttcgccttcacttaggctactttccgggctgggctccgcgacataaatcaggtcaatatcgctgtgatagttaagttcccccgccccggttttacctagggcaatcaccgcgaaatctacctcgccagccgggtcatattttgcgcgtgctagggcgagggcgccctctaaagttgcatcggtaagggcgctaagtttgccggccactaccgaaaagaaggctagcggatcggggtgggaagcgtcctcggcgattatttgtaataggtgagcgcgataggcgcaccgcaggtcattgaggttgcgatccttggctagccagatatcttcccggatttcttgggcgtggacagcctgcaaaatttcttggcgcacccgggtgcggtagcgcgcaactagatctagttcttgggaaacaagatagcgtttaccatcccaataggcctctggttctgcagcctgaagctgtgacaaaatctggggatgactaactagatagtcgccagcaaaacgagaaactccgcaaatagctattgcgagggcacgctggcgaggattatctaccaggtactttccggtgttctccccggcctctaaaaggttcattaaacacagtaatacctggtcaggatgggcagaagcagatagctcccgccaaaaatcctcattttgcaccagtggggcgaaaaccggggagcttacccagctttccgcgcgcgcaacttcggtaaccccgctagagcgcaggcgcgaagctagagtaactttcctggccatgactatactcgcaagaacttcgccagttctccccgcgtgatttgcgccgagtattcgcgccattcacgatctttattccgcagtacataggcgaaaacttcttcacccagcacttgcgccatgaactcggattcacgcagctctaagatagcttcttctagggtcagcggcagcgcagggattccttgggcgcgccgctcttgatccgatagccgccagacgtcgtcctcggtttctaggggcagcttcatttctttttcaattccatctagcccagcagccagcaaggatgcataggctaaatagggattagctgccgggtccgtaccgcgatattcgatacgggcatcaccggctttttctggtttatagagcggcacccgtaccaacgccgagcggttattgtgtccccaacaaatataggagggtgcctccgagcctccccatagccgtttataggaattcacgtgttggtttactactgccgagtattcgcgggcatgggcaagcaaaccggcggtaaaggcctgtccagtagccgagagctgataaatatcgctagaggcatcgtaaaaggcgttgtgttcgccctcgaaaagtgacatatgggtatgcattccactgccggcctcacctgccatgggcttgggcataaaagtggccaccatatggtcctgcatcgcgatctcttcaatcaggatccggaaagtcataatgttatcggagccggtcagggcatcggaggcccgcaggtcgatttcgttttgccccggaccattttcatgatgcgaaaactctaccgagattcccatttcttccagcatcgccactgctcggcggcgaaaagagttgtccccaccattgggaacgtgatcgaagtaggaggcattatcgatagggcgcagcggctcatctaaggaagtaggcggttctagcaggtaaaactcaatttcggggtgaatattaaaagtgaaaccgagatcggcggcacgctccagttgccgctctagtacccggcggggatcggaacgtgccggctgtagatccggggtatagacatcgcaaaacatgcgtccaacttccccgtcatcgccccgccagggcaagatttggaaagtggaggcatcggggcgcagcaacatatcggattcgtaaacccgggtaaagccttcaatcgcggaaccatcaaagccgattccctcgttgaaggcgtcctctaattcggcggggtcaatcgcgaccgactttagagagccagacacatcggtaaaccagaggcgaatgaactttactcccagttccgcaatcttttgtagtacatcctcttgcgctgagtccacgattcttccttacttcttatcgttattttggggtattaaatcattagttcccgctggggtagttacttggcgtgcgcccaccaacgcctatcgtcgctgcgaccgcatttaagcggcaaactaaacgcttctgaaagattctcactggtcagcacctggtcaatctcaccgctagccatgattcttccttccttcatcagggcggcgcgattaaaagatgccggtatttcctctaaatgatgggtaaccatcacgatctgtggtgattttggatccgagctgagttcatccagggcggacaataaaagttcgcgagcctgcagatccacccccgctaccggttcatccaatatcaagatttccgggtcagccatgagggcgcgggcaatcagtacccgctggcgttctccatcggacaacgtggataacctgcggtcttgcaaagacgctaccccgaatagttccatcaggtttgctcggcgctgatagtcgatatcttcaaaatcttggtcacgcccacgcaccatagtgccataagcggccgaaagaatcagcgccttcacggtctgcgatccgggaatcactcgtagcaccgccgaagaacatagtcctacccgttcatgtagttgttggaccggtaccgctcccagtcgttgccctaagatttctgcttctccactagagggatagttacgagccgccaagatagatatcagagtggtttttcccgctccattgggaccgaggattacccagttctctccaagttgggattggaaggaaacatcctgaagaatggggtttcccccacgcaaaaaactgacgtgttgcaatcggagcagagtatccatatttcccatcttaaccagtgtgcctgcagataagtggcgggggcgagcatcttccccaaagtgctagcccccgccgcagctattacctttctagctgcctatttgtcttataagagggagcggtacagttccacagttttatctgcgactgtctgccaagagaatttttcttctacccgtttgcgtccggctttacccattttcttggccagctcgggattctccagcagggcggtaatccgctcggccatatcccgatggaatttatctggattcgtgggggtgccactaccgtcagatagctgttcaatcggtactaaatatccggtttcgccctctgcaatgcaatcgggaatccccccggtagcggtacccactaccggcagctccatggcggcagcctccagatttactatccccatcggttcgtaaatcgagggagtaacaaatacatgtgctgccgacaagatatttactagctgatcgtgcggaagcatttcttcaatccaaatgattccgctgcgccgggcagatagaccctctaccaatccgcgaacttctttttcaatctccggggtatctggagccccagcacacagcactacctgcgaatctgccggaatctgttcgattgcctgcaagaagtgaggcagacccttttgcctagttatccggcctacgaaaaccacagtcggtatctcggggttaatcccgtatttagccagggtttgggcaaccgcttcctgatcggtaggaagcgcccaatcagttaaatccagaccattatggataacgtggactttatccggatctatctgggggtaggcacgcaaaatatcatccttcatcccgtgagaaacccccaccaccgcatcggctgccaagtaagcggttttttctgcccaggatgagaggttatacccgccgcctagttgttcgcgtttccaaggacgcagaggctctagggagtgagcggtcactacatgcgggacttcgtaaagattctttgcccagtgaccggccatattcgcataccaggtgtgggaatggactagatcagcctgatcgcaatgctgcgccatctgtaggtcaatccctagggtacgtagggcggcattggctccgtcttgttcggcgcaatagtcatatccggtaacccggatcttcccgccatcatcgggacgcggaccgtcaaagcaatgcactcccacatcgattctctctgccagcacctttgccagctcagtgacatggactccggcaccgccataaacatgaggcggatactcgcggctcaataaatcaacacgcattttggggatcctttcttaggtgacctttgagattgctgttatttaccagactagtggaatcgcgggggcgcggggcaggaacgaaaaatccttcgctgccgccccgcgcccaaacattcctgacaaagcgggttatttccgtttcttgttaggatttaccccttcgagtctatttttagccaggcgcattccggcgttaccagttttttcgccccttttcatatagtagtagcggtacagggggtctttgtcgtaaccattctttattacctgttcccagatccattcatcggttatttcttttccttgccttaaccggtttatgacttctaggctttgtccgttgtaggggtcgaaccaccattttggtccggcgcttactagaactccgcctttgccgttcccgctcccatcgcgtttcatccctaggtacttggggccaagttcctcgatgagggcgacttcttcttctatctgccgcagaaccccgatatagaggaataccaccaggatccgggcgcaaagtttaaggcaggctcgcaggcattcttccgggttttgctggtaaaacatttcgataacttcacctcctgcgtttccgattcccccatcgatatggaagatttcgttaaaaagacccctgactatcgccgcgacctctttatccgcataggattcctcccattcggcgtgctcctcccccaggtattctcgatacatagggggattttcttcgcgcaccagacaatcgcgggtgaaaaacagtagtcccttaaagtaactggaataccgaaaatataagggatgctggattttcgggagatcagggtcctcccctgtcatttccttctcgataacttcccccgcccactttagataagcaataatctctttattgctctcgtcgttcttggggtcgttaatgaagtccaggtacttaccggttacttcttccttattcatttttcgctccttatctaaggtttcagccgagaacttttcccgacacttcctatatagggcgcatgcacatttttgctgctaaaagcggaattcagccgtttttaacgctttttacccgcatcgagagatggtcaacgcctggataaaaccgcctgcctttgcggggatttttctggcttgtactgacccctgacgccaccaggtcttgaccggggaatctggggctgagtagatagagaaaaccagtctctgtttttgaatattgggtgagcgaactacgactacttcgttaatccttctcaaatccccgcgcgagcactaggggttggcatatgctggccatatggcaaaaaataacgtattagcaatgattctggctggtggcgaaggcaagcgcctgatgccccttactttagatagggcgaaacctgcggttcccttcgggggcacttatcgtttgattgatttcgcgctttccaatgtggtgaactccgggtatctacgctcggtagtgctcactcagtacaaatcgcattctctggaccgccatttggcgaccacttggaagatgtccgatttactgggcaactacgtggcaccggtacccgctcagcagcggcggggcaaacactggtaccggggcagcgccgacgcagtctaccaatcactaaacattgtgcgtgatgaaaatccggagtacatcctgattatcggggcggacaatatctaccgcatggacttttctcaaatggtcgatgaccatattaaatctggattgccttgtacggttgctgggattcggcaaccgattgagctttctagtgcttttggggtcattgaccaaaccaacggaacgattaatcgcttcattgaaaaacccgaaacctgcgagggtcttcccgatgaccccacaaagttcttggcctcgatgggcaactacgtattcaccactaaagatctagtggcagcgctagaagcggacgctaacaatgaagattctaagcacgatatgggtggggatctggttccttacttcgtagagcatggcggggtgaactgctatgactttattgaaaatgtggttccgggcgctaccgaccgtgaccgcgactactggcgagacgtgggtactattgatgccttctacgaagcgcacctagacctgttgtcggtgtctccggtgttcaacctctataactttgactggccaacctacacgaaactagatgcgtggctgccccctgctaagagcacttttagcgatgagaatcgccggggtatggctctggattcgattgtttctccgggggtaatcatttccggtgcgcgcgtggaacgctccatgctctcgcccatggtgcatctgcactccttcgcctctgtagatggctctgtgctgatgaatggcgtcgatgtggaacgctccgcggtgatccacaatgccatcttggataagaatgtgcgtgtggccgaaggcgttcagatcggggtcgatcacgataaagaccgcgaacgcggattcacagtttccgagggcgggatcaccgtagtacccaaggggacagtagtaaccgaatagcctcatcaaagctaaaaccaaagactgggggcgggaacatgaagccatgttcccgcccccagtcttatagctattggtggttggaaaaacgcgccggatttttcctacttacataccggagtacatcattccgccgataaccgcataaaaaagaacatagaaaagcaccgtcacgaccacgccagcgatgaaaccgttacggcactggattgccgtctgaggcttggtattcttccacaccagccaaagaatcaacccggcaatggggatgaagaagccaaggactgcccatccaaaactaccggtgtcccctgggtttacaccagacattcccgggttttgatagttctgcatgggagcctgcgggaaaggtcgcccgtaggccggctgctgccccatttgtggttgcccatagcctggttgctgccccacctggggcggaatcggagccggctgctgctgatagggatagggagattggttagggttggggttggagttggggttaaattgactcatttttattcttcctttgaatagagaacttagaattattttcctataacgcccggatacgtggcaaatttaacccttgacttaattttgatacaaaaatttattcccgcactgcagacgcgccttcaagaccgttgtaccccttccaaaacctcttttaactgctcaaatagcttcttcacttctctaacgcttcccaattaaacccgagactattggcgcaacgaggcgtgaaaaatcccggttagctccccgcagccgcagctaagagcactaaagccgggaacttgaaaagcaatagcggtagcggtggacactccgtaaggcacgcccgcgtccgcgggagctagaagctgggcggtcatcgaaattatgggctcatgccctactactaggatggctttgccgcctgccggcccatactcccccaccaaacgcaatagccgctccggggaacagtgatagagctcgtcctctgccagtagctgcgcgcccggataagccctgccgatctgctgagcggtttgggcagcgcgagccgccgtagaatgcaatatcagctctaccgctaccttctctttaacaagaagcgcccccaactcccgcgcctgccgtatccccgccggagttagaggacgagagtggtcgcctcggccataaccagcctgggcgtggcgcaccagcgttaatacgtagctcatacccccatcctagctaagcctctagaatgaaaactaaagacaaggagaaacatggctttagctaaaggaccagaagacaatatctgttcggcgcgcggatgcgaaaacccggcaaccaaagcagtcctgtggcgtaaccctaagattcctcgtcccgtacataaaacctggctgacttgcgacgaacacgctgattttttgcggcaatacctggcgtatcgctcttttcccactaaagtggttccttttagcgaggtcgatacggcaactttggattaaccccggattatccgctagcgccgacaaagtagcgacgaaggtcggcacctagctaagtcagttccaccagatccaggtaatcatcactccataaatcttcatccccgtccggcagcagcaacacccgctgcggattcagtgcctcaacggcacccggatcgtgggtcaccagcaccactgccccctcgtattggtcgagggcgtgcaagatttcttcccgagacgccggatccaggttattggtaggttcatctagcagcagcacattggcgccgcttaccactagggtggccagtgctagccgggttttttctccccccgaaagcacactggccggtttaaaagcgtcctccccggaaaataggaactgtcccaagatgttgcgcacgtgggtttcatccaggtcgggagccgccgcagtcatattttcataaaccgtgcgagcgggatcgagggtttcgtgctcttgggcgtaatagcccagtttgaggccgtgaccggggacaacttcccccgcgtctgcgtcctcgatcccgtttaatagtcgtagcagcgtggttttccccgcgccgttttcccccaaaaccacgactttgctgccgcggtcgattgataaatctaggccgctaaatacctctaggctgccataggatttcgcgaggccgcgcgcattcaaaggtactttgccgcaagctagtggagtgggaaagcgcaggcgggcaactttttcagctttggtttcacttccggcttcttttactagttcttcggctctgcgtagcatttgttgcgccgcgactgccttagtggctttggctcgcattttttcgccttgctcgcgcaatgcctgtgctttcgctaaggcgttttggcgctcccggcgtcgccgtgcctcatcttgggcgcgctgcttcaggtaggcgtcccaccctagtttgtattgatcgatgaccgcccgggaggcatccaggtaccacacctggtttacggtgtcttttagtagcgccgtggagtgggtgaccattacgaagccgccggcataggtgcgcaggaaatcgcggagccaaataatggagtcatggtctaagtggttggtgggctcatctagaaggagtacgtctggctgggaaaacagtacccgcgccagttctactcggcggcgctgccctccggaaagggtcgccagcggctgagtgagtgcggcctggtctaaccctaagttgtgggcgatctgcatagcttccgagcgggcagcatacccgcctagtcgggtgaactcttcatccaggcgcgcgtatctttctatcgccttcgcctgagtttccccgctggtagtggacattttttcttgagcattctcgattgcccgcaaagtgcgatccagattccgcaccgccattatccgagaaatcccatccttttgtttcacccccactgctgggtcttgtgacagataccctaccgaccccgaggaagtaactttgccttgaaagtcgatattgtcgattaagtcttgggcttcttcttcgctgagggaaccgctagagcggtgtttacctagcgccactagcgccgcgattaagcgcatagtagtggttttaccagcgccattgcgcccaactaggccgatccgcattcctttatcgatacgcaaattggtgcgggaaaccaagagccgctgcccgatccgcacttccatatcttgcgcattaatcaccccgcgattctacccaggagctaccagtagttaaaactgatcagggtcttacacgcggcaataatggttatggaagtgcttccccgagctaacagggaggtttacaatagtgctttagcaaaggtaccgtaacaaagggaaaagtcatgcccgtaaatctgagccgcaaagacattcaagctatcgatgccgccaaagcctactatgggggtctcccccaaaatgaagtggcggcgcggctgggaatctcccgtcccacggtttctaaactgctgcgctatgcacgtgccaaaggatacgtgaaaatcacagttaatgaccctcgactagcggactcttcaaccgctaaagctttaatgacgcgttttggcctggaggaggcggtggtggtttatcccagtgctccctccgatattgaagtccgcaaagcactgggggaagccggagctcgaatggtagaaaaggtgattaaagatggcgataccgtgggggtttcctggtcacgaaccgtcgaagaaatctctaagaacctgaccgctcagccgcgcaagaaggttgagatcgtgcaactgcgagggggcgtaggcggatttgcgcgcggacaaagcgaaatcgaggccgttaatcgttttgctgaggcttttaaggctgaggcgcatctattgggagcgcccaccgtttttcaaagtgccgaagccaaacaggcgatgatgaaagaaaagcaggtagctgcagctttgaaacgcgggcgggattcccgcatagctgtctttaccgtgggagatgcggcaaaaagttcctatcttttgactctgcccaccctctcgcgagatgtaaaactgtttttagagaaaaaagcagtcggcgatatttgttcccgattcatcgatacccacggcagggtgtgtttgccggaactaaatgaccgcactatggcgatatctttggcacagctgcggcggattcccgaaaagattatggtcgctggagggggcgcgaaagtagcgattattagggtcgccctggaacatggttacgctaatcggcttgtgattgacgcggctactgccgcgcaagtgctggatatgcgagtcaactagctagcaacccggaaactagccttggaggaacccaaagagtctcccctatacggcacaaacttaaaccggaagttacataaatttaaataaaaatataatcggctctcttgtctaggcgaggtaggtctctaaggtgtgaaatgcgcggctatcagggatttaaagcttagcaatcgcgagaaacaccgataggatgaagacatgaacaatattagtaaactacgtaaacccaaagcctggatgaccgatatggatggtgtgctagtgcacgaatccaaagcactcccgggcgcacacgagtttatcgaaactctaaaagccaaagaaactccctttttggtactaactaacaactctattttcactaaccgtgacctagctgcgcgtttggaggcctcggggcttgaggttcccgaagaacgtatctggacttccgcgaatgctaccgccgagttcttaaacagccagtcccctaactccaccgcgttcgttattggggaggccgggctgaccaccgctattcacgaaaccggctatgtgatgactgaaagcaacccggagttcgtagtcctaggggaaacccgcttttacgatttcgtcaatatcaccaaggcgatccgcctgattgaaaagggcgccaaatttatctgcactaatccggatactactggaccttccgaggacggaactttgccggctgtaggatcagtggccgccatgattactaaggcgactggacgcaacccctatttcgtgggtaaaccgaatccggtaatgttccgcgctggactcaataaactgggagcacactccgaggacgcagccatggtcggtgaccgcatggataccgatattcacgccggagtcgagagcgggatggactcctacctggtgttaactggttcaacttcccgcgaggacatccataagttcccctatcgccccaaggcggtatttgagggaatcggagatctactgcctctgctttaaatctgattccttttaaataatgggggcgggtagcttagctacccgcccccattactgtttaaaagctacttaactaatctgccctttggcttctagttctgcccgcaaatcctggaacgccgtgtagttagctaaaatatcgacttgaccgctaccaaacatactgatagcgcgataggcgctattttcaacttcgcaggttaccccctgtttttgcaaacatgcttgcaccttatcggcacattctccggaaacgataactttcggggttccccgtagaggggtgaaatcaatatcttcaacccaagaaggatcagttccatctccgatacgcgcattgaccgctaatattgctcccgctgctccggcgtgacgcatagttagagcttctcgccatcctgcggggttcttagccaaaagtaaatgcccttttacctctcccacctggcaggaggcatagcgtcctgccacctcggtaactagggggattccctgggcagcggccgaaagtggcgctcccaaaacgctggcagctgccaaagccatgagggcattgccgcgattaaccagacccggcagattaaccactactgattgcttagcccccggcgccgacacttccatagcgctacctgccattactgcttcgccctcccctagagccgaatcctctaggcggtagctccaatcgggctgcgggcggcggaatgtcggttcgccagtagaaaaccaatcctcgccctctcgcttaatttctttacctgaacgcgggcagaccagggaatcgtcaatccagcgggtgccgacactaacccataccttttgattaccgtcccaggcagctgaagttaccatcgggtcgtcacaattagctactaccgtagcctgcgggctgagagcaactgcctgccgtaaccgtgcttccacatggccgactgcacctacccgatctagctggtcgcgagaaaggttcaggtacagcaacacctggggtttaacttccgcagcgaccaagggaacatgcatttcatcaacttctaaaaccacatagggggccgaaggattttccataattgcggcgattaccccattttccatattgtcgccgccgcggttagtagccactgattttcccgcttgctgtagggcattaaccagcattttcgtggtagtagatttcccattagttccggtaactaaagttaccttttttccggcggccaggcggctcataatatcggggcaaattttttgtgcgactcgcccgccaatcattcccccggaacctttccctaaagtacgggaagcgaaagcggcagcttttccaacggtaactgccagatgtcctttaaaaccaaaattcatggtttaagactacaagaattttttcttggtaccgctaaggcaagctagtgagattctttacgattttatttacctaaagattacctagggtggctaccatcaccgctttaatggtgtgcattcggttttctgcttggtcaaacacgatggaacgttccccggagaacacttcgtccgtaacttccagggcatctaaaccggttttttggtaaatatcctcccccacggtggtgttccggtcatggaaagcgggcaagcagtgcaagaactttgcctgcgaccctgcttgttccattagcctggcgttgacctggtagggcaacagcagcttaatccgctcgtcccacacttctttcggctcccccatagaaacccaaacatcggtgtacaggaaatcagtgcccttaaccccggccgcaggatcatcggtgtgggttattttcgcaccggtttgaattgcaatttcatgggctttatcaatccaacgctgctcattccacagctgccgcggccctacaatccgcacatccattcccatcatcgccccggaaatcagcagcgaattcgacatgttattgcgggcatcccccaggtaggcgaaagaaatatcgctcaggtcccgcccagaatgttctaacatagtgagctggtcacagagcatttgggtgggatgccactcatcggtgagcccattccaaactgggactcccgatagccgcgccaaagtttctacgtcctcttggcggcgtcctcgaaactcaattccatcataaaaacgccccagcacttgcgcggtgtccgccatggattctttatgcccaatttgggaggccaccgggtctaggaaggtgacgttagcaccctggtcgtaggcggctacttcaaaagaacagcgcgtgcgagtggaagttttctcaaaaatcagggcgatatttttgcagtttagatatggtttttcggttcctgcgcgtttggccgcttttagctgcgccgccaaatccagcagataccgccactcctcggcggtaaaatcgagttcttttaggaaatggcggccagatagtaatgccacagtttaacctttctgtttactatatttacccaggtagatcagatttaaactagttatcgatagcctcgcgctcaagcggacaagtcatacaccgcggtcccccgcgtccgcgtcctagttccgcgctgggaacttccaacactttgattccttgtgaacgcaagtattcaatggtttgccagttacgatcataggaagtaaccacgttttcacgcagcgccagcagattgcaagcatcattccactgcccacgctctgccccactatccgattggggggtctgcaaaatatttactgacgacaccccactggcctgcgctaacacctgatgcatgtcttctgccggatagtagcgccaggaaatatttccttgcggctctcggcgggcaatgacgctgggcagcatccccaggttcttgtatttatagaaggtatctcggttaatcatggtgattaccgtgtccaggtgcatttgggcgcgcaccatcggcattagcagaccggtaaccatttctacggaggaagaagcatccagcagcagacgagcagcgaggcgttcgaaaccggccggactggtgcgctcccccatacccaccagtaccgaagttggtgacagcacttccacgtctccgccctcgcaggcagccgggctatcggccatccccgaaccaaactgagtgaaattatcgttaaaatcagggtgaaaacgatagatagcctgcaggtttaaagtttcacggcggcgagcagtcttgttcatggctgagagcattactcccttaccgatccaggcggaagtatcccgggtgaacaggtggttaggcagcgaatccaaaatcaaatcttcgctgcccacgcgcgccaatactgcggaggccaccgaccccagctctgccacgatttcggagcgggtgagcccactaatcagaatctcggccagctgcttgcttgcttgccccaccagatattccctgagcggagggctaagcactaccccaaaatagcgctcatcaatagtctgttccagcaaccattttcgtgccggctccaagtctaaagtttcggctaataggtcttgcagatacacgatctcggcaccttcagaggaaagggtggcactaaaatgatcgtgatcttcgcgtgccttttccagccacaaaatatcgtcaaaaagcaattcttcacggttagaaggagtcagccggtcaagctccctgccaggacggtgtactaaaaccttttgtagttttccgatctctgaccagactccacgcaccatggatttccccttgctagtttttctgcaagcctatgttatcccattaaacgttgaagccgagagctcgcagctgttcgcgcccttcctcggtaatccgatccggtccccagggaggcatccatacccaattgatggcaacgctggtagccatagcgctcaacacccaacgggtttgttcttccaacatatcggtgagcgggcaggccgcagaagttagcgtcatctcgatagtcactgccccgtcggaatggatttccgccccgtagaccagccccaaatccacgatgttgatccccaattcggggtcgataacatccttgagggcttcgaatatgtcctctttagttacctttgcttcagagggggtaagtggcgcagaggggtcagaaaaagtttgtgcttctggcggctcttcgccagattcttgcttatcttccgcgcttaaagcctccgctactggtgcttgaggcgaagcagactccccatgctgatgctctttagagggctgatagggaccggcattttcatttccggcagccacttcctgaaatcgctgcggtacttcagcggggttttcccaaggacgttcttcactcattttcttgcctcgcttgcgtttttgcgattgattctctcagtgccatccaccctaaaagggcgcatttaacccggttgggaaatttggaagttccctgcaggctagccgcatcttccaggggatctaacacttcatcgggaacttcttgccctcgcgaatgcatcatttggtcaaaatcattccaaagctgctcgatttcggcgagagattttcctgctaccaggtcattcatcattgatagcgatgcctgagaaatagaacagccctgcccctgccaggcgagaccggctagggtatcgcccttcaaagtaacctctaaagtaacctcatccccgcaggtaggattaacttgataggaggaggtatccgagggttctacctgagcgctgccgtgtttttcggcggcgtgatccataatcacctgctgataaagctgatcaatagccgaaaccattacttccccctaaaaaagaaactacgaactacttctaggccttcgattagacgatcgatatcgccgcgcgaagaagtaagcgacagcgatgccctacaggaggctcgcaagccgtagtgggcgtgcaaaggtagggcacagtgatgacccacccgaatcgccacgtcctcggcatctaatacctgacccacgtcatggggatgaatccccgcgaaatcgaaagccgccagccctacccgttcccggtagtcagccgggcctaaaagccgcaagccttttaccgtcgccagcccttccagcagatactgagtcaaagccagttcgtggctacgaatccgctccattcctacttcctgcaggtaatccagcgccactgcccagccgtgaatctgggcgactggctgcgagcctgcctcaaaacgctccggggcaggttggaaagtggtcttgtccatggtgacgtcggcaatcatggatccacctgccaagaagggcggcaattgctctagcaattcgcggcgcccatataatgccccaattccggtaggaccagccattttatgcccggaaaagcaggcaaaatcggctcccagagctttaatatctaacggcatatgagcgctggactggcaggtatcgagcactacccaggctcccacatcgtgggcagctttaacaatgggcgcaatatcggttatcgccccggaaacattagaggcgtgggttaccgccactaccttggtgttcggggtaattgcatccagggtttccaggtcaatccgcccttgcggatctagatccagataggcgaactcacatccagtgcgctgggaaagcagctgccaaggcaccaagttggcgtgatgctccgcccgggtagtaactacccgatccccttttcctaccagcgaagccccgccctctatcccgggattcgagagggcgtaggccaccaggtttaacgcctcggtcgcgttcttcgtccacacgatttcttccggggaggccccaataaaggtagccagtttaaggcgcgcgtcctcgaaatactggctagattcatcggccagcaggtgggtaccccgatgcacagccccgttagatttttcgtaaaaagagctttcggcctcgataacggaacgcggtttttgcgaggtggccgccgcatctaaataaacgatcggttttcctccccggccagggcgggaaagaatcggaaaatcggcgcgcagacgcgtcagttccctatcggtaaatggcgaatccattagcttttcctctcaaaaaccagcaggtattgatacaaaaagggagattacaggtaggagtcgtatccttccgcttccaatttgtcagccagttcgctgccgccggaatctacaatccttccatcggcgaatacgtgcacgaagtccggtttaatgtagttcaagatccgcgaatagtgggtgattaccagcaggccgcagcctagtttttcatgggcatggttaactccggcagacacggtgcgcaaagcatcaatgtccagaccggagtcggtttcatccagaatggcgaacttgggatgcaaaatctgcatctgcaaaatctctaggcgcttcttttccccacccgaaaaaccagcattaaggtcgcggttagcgaactgggggtctacccgcaggtcttccatcgcttctttaagttcttttacccaggtacgcaccggcggagcctgaccgtcaatcgcagtgcgggcagtgcgcaagaagttagataccgttaccccgggaacttccaccgggtactgcatcgccaagaacagaccggcacgagcacgatcatctggagaggattccagaatatttacgccgtccagcagcacttccccgccctcgatatggtagccggggtgaccggcaatcgaataggccagggtggatttaccggaaccattcggtcccataatcgcgtgcttctcccccgaattcaccgttagggaggcgccctttaggatgtgctttatcccttcgggagtttctaccgaaactttcaggtctttaacttctagtttccccatttattcatttcctttactgcggctgcaggcgtcaacgtaaaccgcctgtcctttgatttcaagctgataacagttcactggctcggtggccggcattgtcggttgtccggtgttgaggtcgaattgggctccatgtccccaacattcaatcgcacacccctctacatcgccctcttctagagggatatcgccatgggtgcagagggagtcgatggcgtgccaaccgccgtcctcgtcccgcaccaccgcgattgggatcttatccccccgctcgtcggttacttcggcgcgcagtgcctcggcgggctccaaggcgctgatctcgcaaactttttctaggctcatagcggatccgggcctttttctagtcgggcatcaaccgcttccagcagatggttttcaatttcatcgattccgatctggcgaatgacttccgcaaagaacccgtggaccaccattttgcgagcgatatcttcggggatccctcgtgatagcaggtagaacagttgttcttcatcgaagcgcccggtagcggaggcgtgtccagctcccgcaatctctccgttttcaatttccaggttcggtaccgaatcggctttcgcgccctcgttcaacaccaggttgcggttttgttcataggagtcggtgttgaaagcattcttgccaatcaacacatccccgatccagaccgcatgtgcctgctgaccttgcagcgcccccttgtaatgcacatccgaacggcaattttcggcgctgtggttaacgaataagcgatgttcctgatgctgtagggtgtcggtgaagtagacaccgtacatctctacttcccctccagctttatccaagtcaatatcgggacaaatccgtaccaggtcgccgcctaaggtaatcgcaatatgcttgagcttcgcgtctttttctacgctcatgcgatgattactggcgtgaactgccgctctgtcccattcttggatagatacgaactctaactcggcaccggattccacatcgatttcgatcccctggttcagctgggcatcgccagcgtgttccaggattactaacgctttcgcgtcaggttttacatcgatacagatatgttgggcagccggctggcggctttccccgatcactttgatgcgtagcggttcgctaagctgctcggcgattactacgtttaccaggtcacggtggttattccactctacaaccgcagcgcgatctcctggcgctccgatttttccgtgaatatcgctatcagtagctatttccacataggaggaagcacccagatttatccggctatcgacccctaaaatctctccgccgacctcgacccggggagctgacccctctaaagtatccgtaagcagcatctttatccgctctagcggggtgaatcgccaatcttcctcgcgtccgcccggcatggggatatcggcgaggttaaaagaggtgggacgatccgcccgggaaggagccgcgactactttatggcctgtctgctttaccatctcggccattaacccaccgatccttccatttgtagttcaatcaggcgattaagctctagggcatactccatcggcagctcccgagcaatcggctcgataaatccgcgcacgatcatcgccatagcttcagtttcgctaagcccccgactcattagataaaacagctggtcagcacttactttagaaaccgtagcctcgtgccccatctctacgtcatcagtttgaatatccacataagggtaggtgtcggtacgggaaatctggtctaccagcagcgcatcacaaaccaccgaagccttggagtgtttagcctcgggagcgatcttcaccagtcctcggtaggaggaacgccccccgttacgcgaaatagatttcgacacgatcgaagaggaagtgttcggcgccaggtgcagcattttcgccccggtatcctggttttgtccctcacccgaaaacgctaccgacagagcttctccccgggcgttcttgccggtcaaatagacagaggggtacttcatattagtttttgaccccatattgccatccacccattccatagtggcgccttcttcgcagattgcccgctgggtcaccaggttatagacgttagtggaccagttttgaatagtggtgtagcgcacccgggcatctttgaggcagaaaatctctacaatcgcggagtgcaaagaatccgatttatagatcggtgcagtacaaccttccacgtagtgaacgtaggagccctcgtcagcaataatcagggtgcgttcaaactgccccatgttttcggtgttaatccggaaataggcttgcagtggaatctctacatgtactccttttggcacatagatgaaagatcccccggaccacacggcggtgttcagagccgcgaacttattatccccggcaggcaccgctttgccgaagaaccgtttaaagaggtcttcgtgtttgcgcagggcagtgtcggtatctagaaacactaccccttgtttttccaggtcaccacggatctgattataaaccacttccgattcatactgggcggctaccccggaaaccaggctttcgcgttcggcctcgggaatccctaagcggtcataggttttcttaatatcttcgggcaagtcttcccaggagttggccactttgtcggtggagcgcacgaagtatttgatctgatccatgtccagatctgataaatccggcccccagttgggcatgggtttgcgttcaaagaccttcagcgctttcaagcggcgcttaagcatccattcgggctcgttcttctctgcagaaataaagcgcaccacgtcctcgtcaagaccgcgcctagcgctttgtcccgctgcatctgagtcgtgccagccgtactcgtattgagtgccaatcgagtcaataacctgctggtcagcagcctctttctgctcttttgtggcaatcaccggtggtgatgatgtcatttgtgttttaatccctcttttgtgttttcttcctgccctagtctgtcatgttcaacggtttacgaagaattttcgggttgggtaacgctaccggcaccgaggtggtgcaaacatgctccccatccgccaaagtcgctagcctttgcacatggacatttaaaagacgtgaaaaagcttgggtttcagcttcacaaagctgcgggaactcgccagcaacttcttgcaccggacaatttccttgacaaagctgtaccgcgaaaccgccattacctacttcgcgaaccgtcgccgcatatccatcggcagttaaagcatcggcgagagcccgagcccgggctttagggtcagagccggcctctttaatcatgggcgcatagcggcgttcaatatcgcgagaatgcgcagccgcgaaagtatcaatcccgcccggacctgccacctgctcaataaaaccaagagcccgactagccagtttggagtaatcttcgctgaggccttcgcgtcctttgccagttgctatatagtgacgagccgggcgacctcgaccccgtttagcctggggagcagtttcatagaccgcgatcatctgcccggattctaaggcggtgatatgccgccggacagcggcagtggtcaaacggaggatcttcgccaagtgcgcagcggtaaccggccctttttcgacgatcaagtccaaaactgtttgtcgagtcggctccgtatcgctcacgtttccccctccttaaaaatagacctaagttagtctaacgcattttagtaacggctgtctttctaaaatagcagacgggagataaatgtggtgggtgatacaagtagatttggtgctatcaggggcagttagtgaggttgcgacggcaaattatttcccgggatatgttcgcggctagcggattttctcttagctttcgatctctaggggatcgggagcgaaaggcgcggacacttcccgcagcccttgccatccctgccgcaaagattcaatcaccgacaaaatagcagccattgccgaaggattatggatcttcccagctagcagggcatcgcgagcctgctttaaagtaaaccaagcggtgaccatatcgcgttcttcttcactagcctcaaaacgctggcccctagcagcggaaacctcgcgcgctaaaaacactcgtaaatgttcgctgcttcctcccggggaagtaaagaaatccaccagcacctgccaggttttggcctctagattggcttcttcccagagctctcgcttagctgcttctaggcgatcttctccctggtgatctaaaagtccagcaggtacttcccaaagtaaggcgcgcaccggatgtcggtattgacgtactaataagatttcccaatctgagatttcccgggaggaggaatccgccccagatactggacgcaccgccgcgatagcgactgctcccggatgagcaagatagtcacgctggacagcctcctcatccgcatggagacgcacgctatcggtgacaaaatcaaacactttcccctggtagataagctggtgatcttccactgggaaactagagttttcatcgcgcagttccatgcttctccttttcatctctgtcttgatagtagttagtcagggaggtttccttcagggttttctccgtcctcttcccctgcagaagcagccgccggtgtcgatcctcgcttttgctggcgaatttcctggatcaataaggggctcataatcgcgatggtcactattccggcgattgcggccgcagcgaaagtaccgattatgctcggccacaaccccataaaatatccagacacgaaccagccggctaccccggctatcagcgccaatagcgcggatttgcatgccgagaacgcgactccgctaactgcctgctgacctgctaattggcgcaaaccaatcaataatcccagcgcccctacgctcatcccgactgattgcgcgattcccagggctaagaggattccgtttgcccggctgccaagcagtccgggcagggtggcccccagtccccaggaaaaagctgctacggttaaccaaccggcggaagcggcaatcaccgcttgccgggcgcctcccaaggcataaagcacccgagaaacatggtagaccagcccgtatcctacgattccgggagccatagccactagcgcccagagcatccccggtaccggattgatgcgagtgaaaatatcggtaaccggaagcgccacggcccccaggagtgccgaccccagcatgcccaccacggttaccagccgagtagaggctgcacattcgggattgaagaccgttttccctccccggtgcagcaggctagacagccgcggaaacatggcagtagcgatcggtaccgctagcaccgcatagggcaacatataaaccgattgcgaatactgatagataggaagggaaccttccgcgccataggtgcgagttaccaaaatgattactaacactgagaattgctgggcgattaaagaccccacgcccgctcctgccagccggagtgcctgacgcccgcgtccttcccctaatttcaaagttggacgccagcgaatccctagacgatatatagggataaacaggggcagactcatcgccgccaccccggcagtagtcccccaaccaagaatcaagatagcgttatgtgccacctgtgcaggatcggcaaccgaaggagtaagataaccaaaaaccgcgtaggtagaaataactaccagggaatttaatagcggccccagggctggtagcagaaatttctcatgcgcctgcagaatgccggtacccactacacacaacccgtaaagcggaacttgtagggcaaacatctgtaagaaaacactgatcaaatgggcttgcagctggggatcgacccctcgcggacagggcatcacctgcccgatccagggagctagtaagaacactgccacccctaccggagtcagcagcagtaaagcccaagtaatcagcgcagatgaaacccgctgaacctctttgtgcatccgatcggcaataggaccagccaaaatagggatagtcactcccgcgagcgccccaccggcaactacctcaaaaagtaccgtgggtagctgattagccgtggagtaggcattcgcgaaagcaccggttcctacccaggcggattgggttaaccagcgcccaaaaccaaaaattcgcgatagtaaggtaagaacagaaatcagcccgacagccgaagccagggcgggcagcctgctacttacccccgcttttttcaacgtcggcgccctagattatcgatggttttcaaacccggagtattcgctatcacctgtgaaaacgatattttttcactggcagcagtcagcccgacgactcccaggacacccagaatttttccaactgtaccggtcttttgcgcccaggcacttcccagcagtgcccccagcgcattggctccggtatcgcctagcatttcccgctcccccaggtcgtccggtaaagctagcaaactggtagccaaggcaccgccggctaaaggagctgctggccctggctggccgctaaggggcagcgcgcataatgcccctacctttaggcagcgccccggtcgcaagtcaaataggttggcaaggttcgcgctgcccgcaatcagaaccgtatctaacacccaggaaaccagcccggtttttcgcgagcgtccaatcccaattgctcctagtgcggctccagttccaatccccacaatctttagggtgccggtggtaactttaccttctgctaaggcttgcagatgcccatgaaaccccttagcaacagcgggtttatctgatttatttactgaagattgcgagggctcagttgggtttttatctagcgagttactggcttctgcaccctggttaaccggggtttcggctctagtatcatctaaatatccgagggcggctcccgcagctaccggcaacatcgcccccatttgaccgccgcgattacccgccaagcatagaccagaggccaggcaggcggcagcaacttttattcccccggtcagactcacggtttccccatgaaagttttgccgttcataacgcttacgagtctggggagaaaggtggcgccgcaagtaatttctggccaataaataccctgctcccgagactagcgccccctggattgcccgggtcatagctagccctccttcgcaggagcaggaaccggcggaatcagttgcgtcgcatactgctgggttccgtaggcctgattggtgccggattgatcagctaagagcgcgaagggagtagaaactttactcattactgatcccagcccatcgaccgtggtaactgccagtttttcggagcggatctgggtcaggtagctggtttcatctttggcgctacctacgacaaccgttcccttgggcaacatcttatcgataccttttacgaactctaagtccagtttcagggcggaatccttagtgtccttttcgctgccagcagggctaatcaccagtatgaattcagcaggatcgctaacagccgaggcactaattaggggaacatctcccgcagacagattagctaccaaagcctgcacctctgcatcatcactggttaaaccagcagctagggcggtcgaaagcacctgctgggtagatactttagcgtcgaccttatcgcccagtttgctggccaaagtaggcgccagactatcgcgataagatttggaatcatcattaaaccaagcatcttttacggtcactgtgttcactaccgcagctcccgcaaccttaatctggctgttaagcccggttacagtttcctctttaaccccgggcatcctgataaccgcgacctttttaccggtcatagtccccggagtgaccttacttcctagaaccccgatatattcgccgctgctatttgcttgtttcaccaggtcttcgttggattctcgtagctcggcctgctgtttagatagctgcgatacctgcccggtgagggtgtcggaaatcttgccttgcaaaggaccagcccctaacaccacccccattgtgagggcgaccagtacggccatcaacgatactaagtgatagcgaaaatcaatcatttttctcctgccttagttagccctttagtgaaggagcaaccccaaatagttgtcggaaaaagtcaattaaatcatttagatagataccggcaatcccgtaaaaagtttgccccaccggggttaccgccagggagactgctatcgcgcctatacatactagggcgagcagcatagtttgccaggtggatacccgcggctgatagagctgggagactcctttggcgtccaccagtttggagcccactcgcaagcgggtcaagaaagtagaggccatcccagagcgtcctttgtctaagaactccaccaaagtggcgtgagttcccagcgccacaatcatttcggcgtccttatcatcagccagtagcatcgctacgtcctcggaagtgccggtagccgggaagagtacgtagggaatcccttcgcgtttaagccgttcagtgccgggagccttgccattgcgataggcgtgtaccacgatttcggctccacagcgcaaggcctggtcggatacggaatccatatccccgataatcatatcgggggtgtatccctgttccagaatggcatcggctcccccatcgacccccaccaggactggctggtattcacgaatataggggcgcagggaacgtaaatcttcttgataatggtagccacgcaccacgattagggcatgtttaccggcgaatttagtttttactttaggtacgcccaccccatctagtagcaaatcccgctcgcggcgcaaatactccatagtgttcgccgcgaacgcttctatctgggtagatacccctttgcgagcctcttctaggtcggcagcgatagttccggaggtctgcaagataccctcggcaattactttgccatctcgttggactttattgccctcaaccgttacctgactgccttctttaaggttcataatcccggtacctagatcatcaatcaaggtaattccggcatcgacgataatggaaggccccatgttcgggtaacgaccagtggttgatttagcggcattaaggactgcgctgggcccggcggctaccagagtttctgctgctatccggtcgatatcggcatggttaataaccgcgatttcaccggcttgcaggcgttgggtgagatgcttagttttcttatccactcgcacccggctgctagaggctggtgccactgcgtttgctttacggcgtttaaaaaatcccacgaatccacattaccccacgcagcaggcactaatcagctcccgagcgtggtcaagggcagattgtgaatcagctttcccggctagcatccgcgcaatttcgcgttctcgctcactacctgcgacttctctcacctgggcgttctcgttattttttgacactaccagttgtttatctgcccacgccgccacttgtggcaagtgggttaccactattacttgcgcatgcttagctaatcgagccagccgttgccccactgccagagcagtttgccccccgattcccgcgtctacctcgtcaaaaataaaagtatgggtgccctcagctagatcacgcgtagctaaactgacttctagcgctaacatgatgcgagaaagctcgcccccggacgctccctgcgccaaaggacgcatcggcgcgtcctgactctgacgcaacccgaaagttacctggtcatagccatttacggtgggctcatccaaagtatctacctggatttcaaagccggcatctggcatttgcagcccgctaagctctcctacaactttcttttttaaatctttggcgagggcgtggcgggtatcagtgagcttcctgcccaagctttccatttctgcgcgggcttgttctaggtgttccttgagctgtttaccttggttttggggaccagaaagcagcgcgattttctcgcgagctccctctccccaggcctgccagctatctaaatcttcggcgtaggagcgataggcatggcgaagttcagccaggcgtcgctgactgcgttccagttctgcggggtcagcctccaagttagccaaataggctccggtctcggcggcaatatccaaaataatcgaggaggcatccctcagcccctgtgccagctcccccagctcttcatcgctttgcgatcccttttccaaggcctggacggccgcgcttaccagagaagccgcatcgttaccatcccccaaggaatcgctggacagatagctatgagcctgttgggcagcttctcgtaaatcctctacattccccagccgttcaattttgcgcagcagctggtcttcctcccctgcctggggctgcaacttttccagcaaagctaccccttcgctaaggcgggaaacttcctgttcccgcgcttgcgtctgcttttcccactgctctagctgcgcccctaaatcgcgccaaacaaaatatttttctcggaactgtttgacgagcgctaaatgggaagcagctccaaaggagtccaacaagaccaattgccgtccggaagtgcgcagactgagctgttccgactggccatgcacagtaactaactcggttccgatcttggctaatacggcgctgggaatggtgcgccctccgccgtggcaacgtgaacgcccctgggctggaaccgtacgtgccaaaataatttcgccgtcctcgactaccccacctgcatctattacggctgcggccgcggttgaggaaggctcggaaataaaaatgccttctaccgccagttctttttccccgtgtcgcaccaaagaagaatcagctttttgtcccaaaagtagcccgattgaggaaagcaccatggttttccccgctccggtttcgcccgtaagcacggttaatcccggcgaaaaattcagcctagcctccgggattacccccaggttagtgatggaaagctgatcgatcatgacttaccctagcgaacgccaacccttaaccggcaactggaacttgtgaaccaagcgcccagagaaaggagtgtcaagaatttgggctagcagtaccggtgatttgcctttggtggctcgcatcgaagatcccggcgggacttcgtggcagcgcagaccatctagccacagctccataggggtacgctgatcaggcaataccgagatttccatcgtggattccggggaaaccactagcggacgggtaaacaaaccatgcgctcccaggggagaaaccactatcgcctctacatctggccacacgattgggccgccggcagaaaagttataggcggtagacccagtcggggtggccacaatcaaaccatcggctccataggtggtgatgccgcgttgatcgatccctaggccgaggtgggaaggatgggcgcggtcagtggacaaaatagccgcctcgttaagcgcccaatcggttatctcgctgccatccggcaaagaaaccgtcacatccaccgtcatgcgggactgcacagtataggaaccggccacaatatgattgataacttccgagattttatctggttccacttcggttaagaagccggtgtgtcccaggttgattccgatgagcggtactgcttgggcgcgggcatagcgggcggctcctagcagggttccgtccccacctaaagcgattacgatttctaccgctccgggatatttttcatctaccggggttatcccatgatttcgcagctcaagtgccacattatcagcagttttatctaaatcagggcgtgaaaggtgccggattaccattacccgccgctcacccatgagtttctccctctgcttggttggttttatcactttgttgttgccccgctggcccggccgcgattgcatctcttagcattttctcaaccgcgtcctctgctggcatccttgccccgcgaactaggtaaacaaagtactcaacattacctgccggaccaggcagcggtgaggccgcgactttctgtaatcctaacccgttttctttagctgccgcgattactcccataaccgtgtggaaatggtcttccgggtcacgtaccactcccccggagcctaaatgttcgcgcccaatctcgaactggggtttgaccatcaacaaatattcggcgtcagcagtagaggcacgcactagggcgggaataaccagttttagggagataaaagataaatccccgactaccagctgagccggttccccgatttcttgggggtcaaggtagcggatattggtgcgatcatgaacttccacccgcgggtcttgttgcaagttccaacgcagctggccgtaccctacatctaccgccattaccgaggctgcaccgcgccgcaataaaacatcggtaaaacccccggtagaagctccggcatccaggcagcgtttaccctttatgacgggtgcatcctcccctaaaatatcgagggcgccggccagcttatatccgccacgggaagcgtattccacatctggggtttcggctactaccaccgcttgcgcgggatctatctgggaggcaggtttaggcattacttggccatcgacactgacccggccggaggtgatcagccgagccgcatgagcgcgagaagttgctagatgcctacgcaccaattcgcggtctagccgacgcagcctccccacaactatttcctttctacctgcgcattcagagaatctagggcggcagatagcttagtagctgcggcctctaaatcgcttaaagtaacttgcggatagatactgtccccgccctgcggccaattggcagttagctgatcgatatcggattttcgcgcagctagttccaggtcttccggggagtcctgacccttattcggcattttcactgtcaccctcaccgggaagcagcagctctagttgctgatcttcgctgtccgctgcttcatcgcttttcgtttccgctgcaggttctgtttcgctggcagtttcttccgctacggcttccacctcgcgtactacctccaaatccggcaggtgcacgaatacgccccgatcccgggcatcccaaactgccgccaccagggcgcggtagtcttctaggctgaggacctggccattatcgaccggttcatcgtcgcgcatgacccgtccatcttcggccaccataaatccggctgattctccgctggtccaggcgccggtaggctgatgcaccggaccgggatgttctcgcagcaagtcagtaagatctaatcccaaataggagggacgccgatccggataggctaaagctaccgctttggcatcggataccccggtgaggacatgcaagctgagcatatcggcagccacagcccccgcaatatcagtatccaggcgatctcctactgccaaaggtttagtagatcccgcgtgagctgcggctttccggaaaatcccggcaaaaggttttccacctgcgaacggcttttgcccggtcgcatgttctaccgcagccaccagagaaccgtttcccagggcaaaaccatcttccgtgggcaaagtagcatccaggttggttgccataaacaaggcaccggcactaatggcgtaggcagcctcggaaagttgcttccagccaacttccggcccgtaaccttgaataacggccaccggctgctcactggccttgctaactacttcaaatccggcctgtgcaactgtatcgattagcgcctgagttccaatcaccagcactttagattccggttcaatcttttgagtaaggatctctaccgcgtccatcgccgcagtcatgacttcagccggatcagcttcgatcccgtgacctttaagtttttccgcaacctgctcgggagtgcgggaagcattgttagttaggaactggaacttgattccgctttggcgcgccgccgctaaaccggcagccgcattgggaatgtcgcgggtgccggcatagcacacgccatccaaatcgattagcagcgcatcggcagtctctactagcggtttgcggcttccatgcaggtcagagggtacataggggttgtcggcttccagaacttcttccagatccacaatggccaccgtgtccggaatctctggggtttcctctgcgactttatccgcctcttcatcccttcccagttcgcgcaacaaatcagtcttataggaaaggatccgcgccaacatcaccggatcttctagggggtgattttctaagaattgatcaagtagcagcaatgccgcatctgactcacctaggtcatgacgggctcctgcctgcactatcaccagctctaccaggtctaatagttcaaagtccgaggtgttcgtctcagcgataatctctagggctttttcgggcttgccgaggccgcgttcacagtcagcctcgatggctcgcaaactgtcggtgccacttaagcgacgagcagctcgcacctcccgtaaggcttcactatattttccacatccgtaggcggcgagggcgcaggcttcccgtgccgcagcgatccgccccgcgcggctaactgccgctttggcatgcaaataggcttcttccgcatctacatccagtaaagatcctgccatcaccaggtggcgagcaactatttctgcgttattgggatccagcgaagataaagctgcccgggattctcgatccaggtcagatgcttttactcccgcaggaatctgcggttcattctcgtggcgccattcttttgcacgatacctagaatcgcgcaccccgtaggaatgcttgccctctcggggtgcttgtgcttcccgctcccggcgttcatcacggcgttcatcacggcgattatcccggtcaaagcggcgcccgccccggttatatccccgatcgaaacctcgattcccgccgcgatcattgcgaccaaaggatgagcgccccgagcgctgccctcccccgcggtattcccggcgatcgtcacgatattcgcgccgatcatcgcgccgttccccgcgattatcctcacgctgcccccggtaggagccccggtcatcacggaaggatccacggcgatcattacgttcataacgggagttacctccgcggcggtcgccgtgatcattgcgggaattgtctccgcgccgatcctgccatttaccacctgaacggttgttcttgcgatatcctccgtcgcggtatccgccttcggattgtctacgcccacgatagccatcccgatcgccttgccgctcgtctctagacctagagtagtcgcgttgattagaggagttacctccgctgcccgactcagagcgccgcttgcgccattggggttcgcgtctgccgccttgctgattaaaattactcaactctagatccttatctttttgttagtctgctgccttctattctagacgtaaaggtagcggtaaagctgcctgcaaaaggttgtctatcctcactatttcgcaggtctttgtgaccgtaagagccagttttttgaaaagccgcgtcttttctcactaactctgtcgaggaatggctccggcagtgctggctaatctagaaaaatagttagtcaatcagtaacgccaactcatctagcatggtttgtggcgtcatatgcgagttttccagcaggtgatcacgggaatccgtgggcaggaaggcacggggaatcccaaaagatttaatcggggtgaaacagttttcaccggcgcaggtggtgcgtagcagcgctcctactccgttggttacttccccgtcctcgatagtgattgccaaatcagcggcagccacctgagttataagcgcgggagaaatggggataacccaaccgggatccacgcatctaaccgcgtgaccgcgctcggcgagctcctttgatagcacgatggcctgccctgccatagctcccactgctagcaccagaatgtttttgccctggcctgaactttggaataaaacatcgaggccgtctacggttgtttctgccttaatatctgggggcacgctgcccttggggtagcgcactatggtcggcccgtcctcaattgaaactgcctgccctagaagtttacgtaaggtacttgcgtctcgaggcgcggccactctgattccgggagtcatggccgcgatcgccaaatcccacattccgttatggctagccccatcagctccggtaatacccgcgcgatcgagaatcacagttattccctgtttatgcagggcagcatccattaacagctggtcaaaggcgcgatttaggaaggtggcatagagggcgagtaccgggtgacagccagcaaaagatagtccggcggccatagtcatcgcgtgttgctcggcgattcctacatcaaaaactcggtgtgggaattgggctcgcagcggctttaaccctaccggctccatcatcgccgccgatatccctacaattttgggattccgcttagccagttgcacgatttcttccgcaaacaccgctgtccagccaaaacgttctttctttaccggcaacccagtctcgggatggatcgggcccaccgtgtgaaaatggtcggcatcattttcttccgccggagtgtagccacgtcctttctcggtgatggcatgcacgataatcgggccggaaaactctttcgctcgggcgagctggaactcggtagccacaatgtcatgtccatctaccgggccggtatatttaattcccagatcggagaacattacttgctcgggagagaccatatcggccattccccgttttatcccatgcaacgcctcataggtgagttcacctggtttgccgcgagatttcagctgctgtttgccccaccgcaaggctcgttcataggcgggagaggtacgcagcgcatccaggtgatgagcaagacccccgattgtgggttcataagagcgaccgttatcgttgaccacaataatcaggcgtaagttggggcgctcggagatattatttagtgcctcccaggtcatgccgccggtcatggcgccatcgccgatcactgccaccgtataggagtggtcaccttttaaggctttggcttccgcgattccctgcgcccaggacagtgcagtagaagcatgagaattttccaccacgtcatgtactgattccgcgcgggaaggataacccgacagtccttgcgccgtgcgcagattagtaaagtccttacgccccgtcaaaatcttgtggacataggcttggtgtccggtatcgaaaataatggtgtcactgggggaagaaaacatccggtggagagcgatagttagttccactacccccaggttgggtcccatatgccccccggtttttgccacgttctctaccaggaatgaccggatctcaccggccagatccgccagttccaagctggagagcttctgcaaatctgccgggttatttatccgatcgagtatttttgccacccagccagtttagccgcattttagatctataagagcaaagatggatttatcggcagttacttgcgcgtgagccgcccagcgcgtcaaactaaagccatgggtaataagcagtcaggttttgccagctccttagggagctcgcgcgcgggactgaccgcactttccatcgctatcggggcgctagttggtctggtttcagtgggcttttactatctaatcgaaagctggagttatctggtcaccggttacaccgattaccctgcccacgcaggtgccccccacggattcctcggtttagcaccagcatttatcattgcagttccggtgatttcagctttgctttatgcgccggtagttgaatatttcacccccggttctcgcgggcatgctgtcccggaagtaatgttcgccgtccgccgcaaaggcgggaggattcctggacgcaacgccctggtgaaactttttgccgcttctctgaccttgggaggagggggaaatgcgggcagagaaggcccgattgtgatgattggtgccgcgatttcttcttgggtaggaacccgcctgggattaagtaaacaacggctgatgttcctgtgtgcttgcggagctgctgccgggattgccgctacctttaatgctcccctggctggcgcttgtttcgcgctcgaagtaatactcggtaccctcagcgccgaggactttgtcttcatcgtgtttgcctcggtatctgcctccctggtttcccaacagtttcttcctgaccgtgccagcgtgcccctcagccaatctcttgacttgttttctcagagcgattacctgctagtggcagtggcggctttggtagcaaccctggcgggaatcggattttctaaacttatctacctggtttgggatgggatcgacctggtctatcgctggaaagcttggtttcgccctgttgctggttcagtgttgttggggatttttctctactgttgtcccttgctttacggtaccggggagagcgtgcagttgcgggtactttcgggtgatttcccgctcgggatggtggtggcactgctactagggcgcgctctgagtgccgctttcactatttctatggggggagccggcggagtcttcggacctacattatttgtgggcgcctgcgcgggtatggcggtgggagagctagtgcaaccctggtcggcctcttcaactgctatttatggagtaatcgggatgggggcagctttcgcggcagcctcccgcgctcccctaaccgcggttttcatcatcatcgaaatgaccaggcagtattccctgattctcccgatgatgctggcagtggccatcgccaccggaatttccctgtttatgacccgttcgactatctacacccaaaaactgcaccgccgcggcgaccggctgtctgacccggtgtcgtctactttgctcgggcacagtacggcggcggatttaatgcatcagccaccacaagtgttaggtgcagatattactttgggtgaggccgaaaagaccctagaaacctcgggagaaacttcgctgtcagtagtcgattctgcgggaacattccaaggctcagtgagcgccctactgttgcgcgaagaaatcgaaaagcgtggcgaggatgcgcccttaacggatgtctccctgtcctcagcctattgttccccgaacgatcgccccagtcagctactcaaagaactggcagaatcttctctttctaacctgccggtggtggggcgctcccaaaaagttttggggtatgtgcgaggacgcgacttgatcgtcaagctgtaccgccagcaaacccaggcgctcagccaacgcgacttgggagattccctgggcaagcgcatccgcaaacactggaaacatcgccaccgctaacgaagtaactctcatatatacagcgcacaacgacaatccggggtagcaaaacatacgagagacaggctgcatccgctagcctccaaatcgggtaccgggcttctgcaactctgcgttgaattttatctttacctaacccctattacatgtgcttatagtcggtcacgtgttattactacactctacgaaaacggtatacagcaaaaatccggggtggcaaaagatgcgagagaccggttgcaatctctaaccgaaagatcggaaacatacctatttatctcagtgagatattgcccctagccgagcgaagtaaggctaaacggattccccgagcgcttttaccgctccagataatgtgctcgcaaccttgatttaaagacttgaatattctgctcttcggcgagatacggagtactagcataactctgggcacggtaaaagatgcgagtgggggcttgattcgagcgaagcaagaatcaccggggtcccccgagcgcttttaccgtgcccagagcactacatttattgcgttatcaggcaactaggttgcgcagcacgtactgcaggattccaccgttgcggtagtactgagcttcaccgggagtgtcgatccgcactgtggcgtcgaactctacggtggagccatcggtcttagtcgctttcaccttcatggtcggcggagttaccccctcattcagctgggtaatcccgctgatgtcgaaggtttcagtcccgtcgagccctagggaatcggcgctttcgccttcggggaactgcagcgggagaattcccataccaatcaggttggagcggtgaatacgttcgaaagaccgagcgataaccgcttttactcccagcagcaaagttcctttagcagcccagtcacgcgaggatccggttccatattccttgccgcctagcactaccagtgggacgcctgcctgggcgtaggaaaccgaagcatcgtaaaccggtaccaccggggcatcagctttggtgaagtccttggtgaaaccgccctcaacattgtcgagaagctggttacggatgcggatattagcgaaggtaccgcgcatcatcacttcgtggttaccgcgccgcgaaccataggagttgaagctgcgccgttctactccgtgggagcttagatattgacctgccggggtcttttcagcgaaagcacccgccggggaaatatggtcggtagttaccgaatctcccagtttcagcagcacccgggctccggaaatatctttcaccgggttcggggtttccggcattccttcaaagaagggtgcccggcgcacataggtggaggcatcgtcccacgcgaaggtgggtgaatcgggaacctccagggattgccagcggtggtcaccttcaaagacgctctggtaatcatgcagatacatatcgcgatcgatagcctggccgattactttttctacttcttcggcagccggccaaatatcgcgcaggtaaacttcgttaccttggctatctttgcctagcggctcggtttcgaaatcgaaatccatagtaccggccagcgcataggaaatcaccagcggcggggatgctagatagttcatctttacatccgggttaatccgcccctcaaagttacggttaccagataggacggatacgaccgtgagatcagcgccctctaccgtgttgtgtacttcttcgggcagcgggccggagttaccgatacaggtggtgcagccgtaaccgacaatatcgaagcccatctgcgacagatagggcatcaaaccagctttttcgtagtagtcccgcaccacttgggagccgggagctagcgaggttttcacccacggcttgggttttagtcccttttcggcggcgttcttggcgagcaaaccagccgccatcatcaccgaggggttcgaggtgttagtgcaggaagtaatggaggcgatcaccacgtcaccgtgatccatcgcgacctcttctccaccagctagtttcacctgagtggggcgggtaggacgcatcagtttcggatcaatggtcttatcgccggccacatagtcgggcaggatcttcttgaaggaatctttcgccattgccagctcgatgcggtcttgcggacgcttcggaccagcaatcgagggcactacggtggacaggtccagttccagatattcgctgtaacgtgcctcgtgagagggatcatgccacagtccttgccgcttggcgtattcccgcacgagggcgcaggcgtcttcgctgcggccggtcagatgcaggtagtcaatggtgacgtcatcgatcgggaagatagcggcggtcgagccgaactcgggcgacatattgccgatagtggcgcggttggccagaggaactgcacccacgccctcgccatagaactctacgaatttgccgactactccgtggtcgcgcagcatctgagtgatggtaagtaccacatcggtggcggtagcgccgggagcgatttcgccggtgagcttgaagcccactacccgcggaatcaacatcgataccggctggccaagcatggccgcttcggcctcgattccgccaacgccccagccgaggacgcctaggccgttaaccatggtggtgtgggagtcggttcctaccaaagtgtcggggtaagccagcgcgccgtcctcgtccttatcggcgaaaactacccgcgccaggtattcgatatttacctggtggacaatgccggtccccggggggactacccggaagttttcgaaggcgccctgcccccagcgtaggaactggtagcgttcctggttgcgctggtactcgatatccatattcttttcgacagcatctttggtgccaaatacgtcgatctgcaccgagtggtcaataaccatttccgctggtacctgcgggttgatcaggtccgggtttttgcccaaattcaccaccgcatcgcgcatagtcgccaggtcaacgatgcagggaacgccggtgaagtcttgcatcaagactcgcgccgggctgtactggatttccttgctgggctcagcatcgggatcccaattcgcgatctgcgtgatctgctccttggtgatgttttccccatcctcgttacgtagcaggttctctgccaagattttcaaggagtagggcaacttttcagtgccgggtaccgcctttaggtcataaattttatagctcttatcgccgacacttagctgtgtcgccgcgccaaagctgtttaagctcattgccgcctcccatatggaatcgagatattttctcttgacatcaagatactttgcgagctgcgcaagcgccagtatttacaacctcgattttttcttccgcgtataaccgttgcattttatgagctatttttccctcttacctgcaaagacaatagtgggagcttagacgagaccgttgcggatcgtcagagcaaaatcaagtattactccccaaaaacgtggaatttataaaagaatttcgttacctaattttcttttacgttactttcttccaaacatttctagaactttctagggcgcaatctccgcggcgctcccccacccgttttctccttggggacgcgcctcgggatgcaaaaccatatacttcaaagtggccactacttgccgggcactgtagccgtggaacatattatccttgcccccgcgggcaaactggataatcgtatccaaactcatgtagtggtaatgatcgtaatgcggaatcacaaaacgctgattttcctggtcatagcgggtggcatgggtgacattaccgtaagtgatgtactccaaggggacgattagtttcgcttctacctggtcataggtaaacttttcgtcttcgttaacctcggtagtatcatgcggtttttcttcttcatattcggtgatttcaatatcgggatagagctcagaaggatcggtatagctgattccttcatgaccatcggcgaagtgtagatgccagtggtccccgtggcgctcaattttcactacccgttcagaatcatcaatttgattttggcctgagtggtcaccaggtttcggctgctgctcagttggcggttgtgcttgaccaggctggttaggtttatcgccgccgttcggcttggacactcccccattcccaccatgcgaaccggagtactgccctatctttatttgtggaaagacttgcgcgggattttcgtaggtaatatactcttcccccgcctgtgtataggcgtgatagtgatccgcgtgctgcagaattttcacaatcggcagcttggccagttgcgataaagaaaccacccgcaccagtggcaacccacctccagggattggtttcccactcggatgaggcttaaccgtactacctggtactccggaaggattagttttcccacccgcgggaactacttggggacgccacggccgataactgggaacggtattttttccgcccccgtggctgccggtataagttccgatagctatcccgggataaaggccgctgggattagtgtaggtaacaaactcttggccatctgcggtgtaaatatggtagtggtcaccatgttttaagatttttactactccctgcgatgccacctgtcccaattgtcccgcagatagtactttcgcagtgctgcgcagctgccccgcgctcttggctttggccggatcagtgtaagtgatgatttcgcgtccatctttggtaaacacatgccagtgatcaccatgttttattactttcacgatttcatcgctagctacttccccgtccactaacacttgggtggtttcgtctagtttgaacttgggtccttgaggacgaggcattattttccctgcagccgagggagttttcccggagacaccgagggcgtcctcaccgtcattaaaagctcccccaaatgccagcgcactggaagttagcaatagagcagcggctacccccgctcctactattagcttagttttagccatgttttctccttacttttttctaaagactaaggctgctagcagcccaaataccgatatgaggacgattaccgcgccggggcgcagattttgataaaacgaaagcactagccccgcataaacgaagagcaaagacataatcactgacagcagcaaggtgccgcgataggttcgcgcgaactgcatagccccaatcgcggggattaccagaatcgaggagactatcagagatccgatagtttttgccgctaccgataccgctagtgccaccaacagcgcgaacacaaaattgaggacgcgaatatttatccctaatagccgagctgccggaggatcgagtatggttaaaaagaggcggcgataaaggacactgtagactactgccacagccaaccccacccctagcaccagatataattccaagtcgcttagggtaacgatggagccaaaaagataggtggtaatggcactggagccaccggaaaaactggtaaaaatcccagcgagcccaatcgaggcggccagcacgataaccgtagaaatctcttggtaggcgtgcaaacgtactcgcactgcctctatacatagagctgcaattacgcaggcaataaccgaccccactaaggggttaaaaccgaaagctagcccggcggccactcccgccagcgaagaatgtgagagtgtatcccccatcatcgataggcgtttaagtacaatcggcaagccgattaagggcaagattaccgccagcactgttcctaccaggaaggcacgttgcatgaagtcgtaagcaaagaggctcatcggctaacctcaagtttttctagctcgagggaagtcatttttcctgcagacaagcgataggcagcatctaagaaaggagcaacttctgccagttgatgggtaaccatcaaaactgtttttccctggtcgcattgctcccgcaggaggcggtagagatcaagcgaaaacttttgatctatgccgccggtaggttcatccaagagaatcagacgcgcctgtttcaggagagccagtaagacgcctactcgctgtaactgtccgcccgatagctcgcaaagacgatgggtgcgcaccccgtttaaccccacggtgtctagcagggcggtaggctcgctttttctttttagttgtctcagatagacccgcactaactccgccacggtggtcggaaagttgcggtagccgctggccgcgttttgggaaagataggcgaggtcgcgatagtggttatcttcgctactcaggtcaccaaaaaggcgaatttgaccttgcgagggatgcaaatttcccaaaatcaggttcatcagggtggattttcctgccccgttatcaccgctcaccgccacaaactgtccggcagtgagagataaatccactgactgcagcaccgggacatccccgtacgcgaaagcgattttatttatttccagtaccttattcaccgaaggattccatcaagttagttaagtttttctccatcaaccccagatacccgagcgcctcttcctgcctagttaggtgctccatggtgtagagggtgccggttttagctccggtagtgcgtgctagggtttctgcaactttcggagtggctttcccttcaaaaaagatcgtgctgatctgatgtttcttcacgaaatcagcaatggtagccaattggttagccgaaggttcgtcctcgggtgaaatcccggtgacggctacctgtttaagcccgtagtcatctgccagatagttaaaagccgcatgggaggcaacaaaatagcgtttctcagcgggaactttagagatttcccgagcaaattttttgtctaacacctggaatttttcttgggctttttccagattttcctggtaatagctagcatttttaggatctagggcgctaactttttcgcaaattgttttcagctcggcctgagcatttttaacgctgagccaagtgtgggggttaactgcggtgatatcagtgcgggccgcatctttatttcttagtagggttagtccctgtgatagatctaggaatttttcttcactcccaaggctctcgcggaggtctccaataaagccctccattccggcgccgttgtaaacaatcagatcggcttttgagagttcagcacgatcactggtttgtagttcaaagtcgtggggctcttgagtgcctttaataatggtttttacttccatcttgtcaccgacgatccggttggtcagatcagctaccgggaagaaagttgcatacaggaggggttttttcgactcagatttgctacccacattcgcgctttgagagttggttacacatccgaccgtagacagcagaaaaacgacggccataacggaagaaaccagcagttttagtctatttttttgcactatattcctaacggttctctagtttggttttgtctgacttttactaacccacaaatcttaaccgtaatgagaacggttatcaatttaggaaggctgcggatactcacaaaccggagggcgaggttacttcgctcccccattgccgccaatcgtcggaacagattaccgccaatcgtcggaacaaaatagcgccaatcgtcggaaagcaatggtagaatcaataactagataggcagtgaaagcagaaacggagcgactgacttgaggaagtacagagagagaattgctgacgatattttaaaaaggaagctggagggcaaaggtgcggtcgtgattgaaggcccaaagtggagcgggaagaccaccaccgcagaacagatcgctgcaagcgttctatatatggacgacccggaacgcaaagaacaaaatattgccatgtcagagctaaacgcgaagagattactacagggaaatacccctagattgattgacgaatggcaacttgcaccaaaactttgggacacaatccgttttgaggttgatcaccgcagcgaacttggacaattcattctcactggttctgctgttcccgcggacagcaaggacattacccattccggcactggacgctttacttggctaacaatgagacctatgagcttgtatgaatcgggggattctacaggtgaagtcagcttgagagacttatttgctggaatgccagaaattgatggcggcacaaccctaagtattgaccgtctggctttccttgcgtgccgtggaggatggccacaagcggttgatatgcgcgaagcgatagctttagatcaagctattgactactacgatgctgttgttcactccgacattaaccgcgctgacaacgtacaaaaggatgctgagagagttaaacgccttatgcgttcctatgcaagaaatcaaggaggtcaagtaccaaataccgtgcttgcccaggatatttccataaacgaagcaactacaatcaacgaggaaactgtcgcttcttacgttaatgcacttcgcaaaatctttgtcgtagaggatttacctgcttggaatccaaatttgaggtcaaaaaccgctattcgttctgccgacacgcgctactttgtagacccttctattgcgacagcagctttgggaatagggccaaacgacttattaaatgatttaaagacttttggatttgtatttgagacactctgcatcagagacttgcgcgtttttgctgatagcctcggagggaaggcttatcactaccgagataaaaatgaacaggaatgtgacgtagttattcacctaaggaacggtaaatacggtctcattgaaattaaacttggtggcgacaagctaattgaatacggcgcagagactttaaagtcaatggaagcaaaaattgatacccagaaaatgaatgctccatcttttcttatggttttgacaggaatcggcgactgggcctatcgacgcaaagatggtgtttatgtagttcctattggttgcttaaaaaactgagaccaaatacgagtcctgttttcagcttttttcattttctgagattagatatattctttctttatcaatacatattcctgaagtaggattatatatttgaaccaaatctgtcagtttgtcttcaaagacaccggttttcggattacctaacgctgcaaactgctcaactactcttcttttcattccaatagcatttttctgcaaaacatcccttttattttgcaggaattcatcgaccggagatttcttatcctgagtcgtgcaacttttttagttttctggtttttctttggcgtttgtgctggtggtgaggttttggcttgtgtttttgggtcactaaattggtggtggggtttcggttagactgttcgggtgtcgccttttttgcgtaaagtgagaaccgcctcggatgctacggcggtgcagatagtggaaaagcaaggtcgtgtaaaccgggttgtggagcatcttggctcggctcgcgatgaggctagccttcaggtattactggagaaaggtcgcagaaagctgcgtcccgatcagatggaattcgactttaattacctggataccaagattagttacaccccgatagtgcagcatcagtcatcgacgcttttgtggcaggttctccaagactcttaccgggcattagggttcgaccaggctatcggggatgcggcctttgagcagctggttttggctaggattgcagagacctcctctaaggtagacactgtacggattctagacgagctcgggattaaggcggcgcatcgtaatactttcaacaattgcttacagcgctgcgcgggaagggattaccgttcccgggttggtgcggcgtgtttccaacatgccgctaaaacaggggatttgtccttggtgttgtatgacgtgactaccttgtatttcgaggccggcaaagaggatgcggacagcggcacaaatcagggtctgcgcaaggtcgggtactccaaagaacgaagagtagacccccaaatagtagtcggcctgctggtagaccgtagcgagtttcccctggagataggatgttttcagggtaacaaagccgaaaccaaaaccctcctgccaatcgtgaaggacttccaaaaacgccacgggctagatggtttcgtggtggtagcagacgcgggcatgctatcagccgaaaacctcaaaaccctatacgcggccgggtttcgctttattgtgggagcgcggcagaccaaggcgccccacgatctggaatcatattttcattggcacggcgactgctttgctgatgggcaacttatcgacacgataacccccaggcacgccaacgcgaaagtaaacaacaagctgttcaaaccggaacccgtgtggaaccctacgatgagtaaagcttggcgagcgatatggcaatactcggctaaacgagccaaaagagacacggtgactttaaaagcccagcaccgccgtgctctagaggcgatagaggggataaaacccgcccgtaaacctcgcttcgtcaaacaatccaaaaccggttacaaatttgacgagaaagccttcaaccgggctgaaaagctggtagggctaaaaggatacgtcaccaacatccccgccccgctcatgccagcaagcgagaccatcagctcttaccacgagttatggcacgtcgaacaatccttccgcatgttcaaaaacgaccttcgggctcgcccgatattccaccggcgaaaagacgccatcgaagcgcacctgaccattgttatgaccgccctcgccatttcccgctacctgtatcaaaaaaccggaatcaccaccaaaaagctcgtccggacgctacgacctatccaggagcaaaccatcctctaccaaggccacgaaatccaatccagcgaacccatcaccccacaagcccaaaaaatcctggagaaactgggtcactaaacttgtacaactcaggagatccaaaccgccatccgattcctgcaaaatcagcagccagagattaccgactttgacgaagccctcgtcggtcgcctcatcgagcgcattactattcaggaggggagaatcaaggtgcagttcaagtcaggggtggaggttggggatcgtctttgacaacttgaagcggaagcgtgatttgtacacaagcgtgattttcgggactattgaaaagccgaatcgtcccgtcgtacttgtctaaaaaccttctcgcgaaatacaagcccaacccggtaatagcctcatcgttgtttgctttctctgaaaattccttttgcatgccgtttgcaagcgccctttcagaaaaacaagaccccgaattactaataagatattgaaccctgtcttgcagtacttcaaattgtagttgcacagtttggggtgagttaccatgttcaaaggcgttgatgagaacattcatgagcgtttgtttgagtcctatttcgtctatagaaagtgtttgctggcatttttgaaaattgcttcgccatgcattgccatagtgatcacttaggatatttcctaggatgtcaatggattgattgaagtcatccagcgcaatgacggtattacctgcggctgatgaggtatctgatgccatttgctgttgcaagcgatctcctatttctgtcaatcgctccagattcaagataagcgcatctgcgctgtctatcagatcatctttgtttctcatatcactcaggttggaaagatcttctcgtaaaaactctgcatgcgcacgagctaccgttaaaggagtgcgatagtcatgaagcatttgagccgtagattccctcatctgattttcattagaccacagggcctgtagtgtattttttaaatctgaccgcatgcgatcagtcagcgagccgagctcttcaaattctttaattgaaagatgagggaccggataattcaaatttcctgaccctattaatctgactgtgtgtcttaaaggggagatgttattctccagacgcttggatataaaacgcacaaacacaatagttgaaactaggacagaaaaaataaaagcgctgacaaaaataatctctactctaggtagatgctggttcgcccactcagatgagtaatgcacgccgatttgatacttaaagacgcacacgccgccaggataaagcgatttagcaaagtatccttctgagaatggaatatcctcgcctttcaaaaaagatagtgataatttccgatccgatgcactgccgttcgaagaaaggatttcattgttgttgttaagtactacataggtaatagacggagaaacccaatccgggtcaaagtactgttctgcttcaattcgttgttgtagtacctctacttgtttttcttcagagtctgcgaaggaataaacatggtttcgcaccccagtcatgaaggtaacatacaaagcggtgcaaagtactaagattaccccgatgaagattaaggaataaagtaggaacatcttttttaaagtcatatttttcaagttgtccctccagcatcccatttataaccaataccccaaattgttttgatcggatcaacttggtatggcgcaaattttttacgaatgtttttgatatgttcgacaacagcggccggttctgaatctgtccaataaccaccggctctatcaagtatttgctccctagaaaaaacttgaccacgatgccgaatcatcagctcacaaatctcatattccattttagttaggggcacaatatcatcgcgcactcttacttctcgagcagtgaataaaaatcgaatttccccgtcagtgagcacggcatggtgaatgcgtttttcacgtcgaatgtgtgcatttacacgactaaccagctctgagggggtgaaaggttttctaatgtaatcatcagcccccattgccaagccctgaataacatctgtttcagtggttttagcagtgagaaaaagaatagggcagtcgaccttttctcttacttttctgcatagttcgaaaccatccatatccggcatcatgacatcaaaaatcattaggtcgaattgctcgagtcgcagcgttaaagcttcctttgctgaagtgcaggcagttacagaaaaggacgctcgctttaagcttttggcaattacatcgcaaatggccgcttcatcatcaactacaagaatatgttccatttcaccctcctttctcttgctggaagatatttgttattattcgtcacctatgcttggtcgcccatcccatttatgaaaccatgaaggaatcaataccacaaggattagagtaaagaccaggcagaagaagagtccatgtctcaaatcagctgcaacttttataatgttatctgaatgaaaaaagtttgagatcatcaaagtcgcaaatcttggtgcccaaaccgaaggtagataataccaaagttgatcgaacagcccggtaactcccaatgcaccaaccaacaaaaagattgcacctaatgcaacacaccaagaagatccaaatctaagtgctataaacagttggatgagaagtaaacaggcaattggaataatcacgagtatgcagcttaaaacataagcagctacgtgcatttgtccccacaaaagatagaaccccgctacagataaaattactccaatagcgaccagcacaaacaagagaatgaaaattgagaaaaatgtcctcaatcgtgaccgtccaacgcacaaaatattgaaacagtctccggcacgctgctcttgttgtgctacgtaggtgcaaagtaacgtaattaaacaaggcatcactaaggcgatagtttgaaaatagccggtgattttttgctcggtactccaagctgctacagaatagtaagcgataaataagccaactattaaaattggccatagcaaggcaagtcctaaaagaggtgtctttctgattttgtaaatatgagaacgtaaattattaaacatatatgatcacctcgcctctgagtttgaaaatagccatgtcgccaaaaatcccaacacagcagttaaagctaaagataagatcagagataaaacaacatccatcgttcctatatttagattactttcgaccggcagaccgtttggcatgacaccgattacgacagccatacaacgattgacccatgcccacgggcagaaaagccaataggactttaaagctaataacacacctgaaaaagaaataatcaggtttatggcaacagtaaagatgagtccaagcttcttcgatagaatgaaactaaaaggtatctgccaagctgaacttagaaacatgacaacaatgcctgacaaaacagtaacaacactaagctgttttatttgagctgttccaaatatacctaatagagctggtacaagaatgactgcaacgctgagtaataggcaagaaaataaggcatatcccaacacattaatgagctttgcgagccaaattctcttttgcttaatgggcaaagagcggattgtgcgcaaagcgtgtttgccattatcaatattgacggcagctgcaccgatcaaagcaaaggttgcagggaggaacaccacgtaaaaccagttaaataggttaagagaaaaataacctccttgaattgtagccagcgcagcaagacaaagcgggctcgctatggcaacacgtcgtacaatgcttcttttagttttcaaaaactctgattgcaggatgctaaaaaagtccatttatagcctcacttgctgtttacttactacgtccataaacaactgctctaaatctattccctgacgtagcgcaccttggaatccgagagaaccagcggcgataattccaacatgatcagcaatttgctccacctcagatagaatatgtgacgacaaaattaccgtggtgccctgtttcgcaaatccacggattagtccgcgtaaatctttaatggcgatgggatccagaccgtttgtaggctcatccaggataagtagctgagggtgattgatgagagctaatgcgatgccgagtcgctgtttcattcccatagaaaactgaccggacttcttttttccagtgtcagaaagacctacgatttctaaaacttcatcgattcggcttttttctattcccagagccagtgatcgtactctacagttttcataagctgttaagttggggtagagtggcgcattttcaataagtgccccgatttcagaaagaaccgaacggttccaaggagcattattaaaaagaatagatccggatgacggtttgatcatgccgcagatcattttgagaaaagttgactttcctgcgccatttggaccaagaagtccatagacttttccccgagggacacatacatcgattgagttaacggctatttgttttccaaactttttcgataggctctgcgtttgtaaaatataatctgccatattagttgcctcaccttcttatcggtacttaaactgtacgaaagaaaaataaggaaactataaggtgcgagatgaaatatctatctcacccactcagcgggcaaaacatcaatatcacccactcaaatgagccaaaagaaaaatcgactactcaaccctcttaagcatttgccccgaaaacccgttgaccagttcccctgaacagccaaacagccctcgaagcaccatctcaccatattttaaccacacaaaacccctgataaacaaggcttttcgttaccgcacccgtgtcatcaaacacacgctctccaccgggttggtgtggggaaaaggtcgtagatctgcatgaacgcgatccgttagccacgggatacggcaacttttaggtcacgagctaaggctgccgggtcgcaggcgacataaataatctgctccggctttaggcgcgtcaacgccgccatcactttcgcgtacagcaactgcttaaccccagatttaaacacacattacagcctagaaatatctaggaaatccttatcacaagccttactcagaaagaataagtatgaggaattggctaaatgaagtatttagcccgcgatcaggtcgttaaactccaacagtcacttatcgaaaccagcggaggctccgcggcatccgcgatgaagcgctagttaatacaatcttgcgggtagcttccggtgaagccacagaacaaatctctaccagtggacctatgaccatcaagcgtgatccattccgaggacgggtacttgaagtagagctaggtcggaagctcctgtggcgttacagattgacatgattgcgagtgcatgagcaacttccaccccgcatccagagaaaacaactctggcagttattcgtcaaaataaagttagtagatatccgtcaactagcgccacgaaaaagtagagcaacagcgctcttataaatgcctcgatatgctttttcggatctttataaagctctttttgcggtattttcgataatcttatccgcttgctatttcgccaccacagcaaatcaatgacgagcaggtcgaaaacatttaaggtctgtcccagaatcagcaaacatataaagttatgagcgaagttttcctggcgaatagggattccgaaaagtaaaaacaagacagtaaatacgagaaaatttgctgcccagatataggctctccccgtttccttaaactttccgcggtactcgacaatctcttggatgcgatcttgagctttttcaggataggaactgtagttttttaaatttttctgatctgtgccagtctctaagtagcaaaacccaaagaatgccgcacacaacatgactgtctcaattaaaagcacacgtatcccctaaccactgaagcgtactgggtcaatataactgcacgagtcagcacaagagggaaatgatcaaggctttgaatagctttttctatcctgtctatttgtcctctagcatttttaggtgacaataaactaaaggtgatatatgcataaatgccccctaagggctcttctgcttcatgtgttatgcaaactgcatagctcataaaccaaatttcttgtgcaaagattcaaatacttcgtctgccggtttcacatccccagatagcactgactgatagcctttcccctgtgccctgctcgtcttcttcgtgtggcgagcggcgcgaaagcacagtgaggcacacgttctgtctttgttcttgaaattaaaaagacagagcgtgtgacccgcttaggttcaaagaacttacttcttgcccgtctgctgttccctcagcttctggcgtgcctcctgaatctcccaccaatcggaattcttgaatccatcggggcgaacagaatttgggtcgttcgggttccatgtattcttcgtattcttcgtattcttcgtattcttcagtgtgactttaaggtccttcgcgataccctttcccgcttcggcgcccatatacacatacaatccagtgcccgtttcgcctaaaatcttcgtaccttgttgaggccatggattgtctttcgctacggcaatgcatactccgccaccgtaatcgttaggtggcatgtgactgaacatccatgtatggtcgtttaccttcttcacgctccactcactggacttccagctagacggaacatccacatagaagtagtccgtcatgaatgagtgaccgccgttcgctgccttggtcttagcatccttcttttccttagcggctttctcctcggctgccttcttctcttcctctgccttcttggctgctacggcatcgtccctgcgcttctgtgccctctctttaagctcatcaagcttggatatatctatcccactgtccttcgctgcgttatatgctgcttcgatttgctcgtctgtcacctcttccgcagggattggctcgatagtgatttccttctcaacatcggtcttgccatccttggcaatgctcaccttcgtgacagcgtcctttgtgtcatagatggtgccgtcctctgcgattggcgatgccgcaatcgcaagtctgtaatccccgggtttgagcgctatgtcagaggaacttgaccctccatagaacatgctgtccacatcattgcccttggaatcttttccagtagcatggacagggatttttgtgcccttctccgtatcaagccccttggcgttcactacaatcggcacgccatacgtcttggcttcttgtgctgagaaatacagatatgcgcctccgcagcagacggcaattgccgctataacggctatcaccactaataatttcgttcgtttcttcttcgctgattcatcaaccattacttttcccccgtttcctttcttgcaatgttctgagtgcctttatgaaatcatcttgaagtgcttaaatgccttgatgattgcatcgtgtttgtctttcgggcattgaggtcgatttttagcagccatcccttccttttcgtaggagaattgcttctcaagccctagtccatctttcaaagttgcgatatatagcggcgacactttcagtccgtacttttcaagcacgtatgcctgaatctgcttgtatgtcggctttggcggtagtttctcacgcttcaggtctttcatatcaacatccacatataaatgctctttgacattttgccgggttaagagacataccgtctccaggtggtgggtgtgggggaaaaggtcgtaggcctgtagggatacgacctgataaccgtgggatacggcgacttttaggtcacgagctagagctgccggatcgcaggctacatagataatccgctcgggctctagacgcgccaatgccgccatcactttttgtcccgcaccgctgcgcggcggatccattatcaccaggggcggtcccttcatcttgccgccatagtccgcgagtgccttggcatctacccttcctgcgcgaatctgcagacgtccaggagctccagaaagattcttgcgggccattttcactgccggctttgatccctccaaagtggtcaggcgtcctcccctatccaaaattttagctagaggacgcgaaaacagtcctgcgcccgagtacagttccaggatttcttcccaccgccggtccccgggtattagcgggcggtcgctactcgcgtctgcgtccctacgttcgctcgcttcgacactcccgtcagcctcgccattgacagggtcttctagaccctccccctgagcagtagataccccgctacctagctcgtaatcgctagtcgcagccgccattacttgctcgcataaaagccgcgccgcctggcggtgtgcctgccagaaaccgttcggtgccaccaggtagtccccgaaaccgggaaccgataaacgcacattcttttctgcgaccagctgagccgattcgtcataaaggccgcgtccattccacacccgcaggccgttcgcactcgcccacgcccggatgcgccctctcggttttaaaaccttgccccagctggcggggttgctaaataaagatgattcactaatcagcggatccgccaggggaaaactatcaatctctaccagttcttccccgcggaacttagtcatcgctaggcgcccagcagcactgacttcaaaatcggcgcgcaaccgataccctaaaccgtcctcaccgccagtgtgtgtactactcacgccctggcagcgtagctctcccccacaggcatcaagagcttgcgcgaaaacttcctctccccccaggcgccgcaaacaatccgccagcacctgcgctttccagatgcgttggtacgacagtttcacgtggcaaagatccgccccaccaactccgccagaaccacctaaagcccacaccggcgcttgccgctgatccgacgcctgaactaccgccctgacttcggcaaaaataactttgccttttttagcgagcggtacggcttttacctgctcccccggcaacccgaaacgcaccatataggtttgaccgtccctatgcgccaggcagtaaccgccgtggacggggcgcagcagctgcagaaaaacttcactcataagttaaatacttaaaaatcggaggaaaagtcaggctgaatatcctcgtcactttcggttttctcccccagagagggcgggtcaatcccccaaccgccatggacattatcaaaccagggaagacggtcatcttcacccataaaagcacctcgggttatatcttgagatcttcctctgaaaaccgggtctgacttgcggtattcttcgggaggacgcagcggatctatccctgctcggcgatcggcacgcccctggctatgggagaagttccacggcaccagcaccaccagcacccccggcagatcccgcagttggcgacgaatacggtaaacggagcggttatgtagaaacttttgccaaggatacttcaccagatagcagggaatatagatcactactagatcccggggcgagcggtgccgcaaagaccgcacgtgctgaatcaaaggaccggtaatgtcgcggaaaggtgacgctaaaaccgtcagtggcacttccaccccgctatttagccaactttccttcaagcattcaaagtcatcaggctcaatctgcacgtgtaccagcgatagcgaagaaggatgacatacgcgcgcataggagattgcccgcatcgtaggtttatccagattggaaaccagcactatgctttgcacccgcgaaggcaaagcgcgttcggtggcaaaatcgctcaccagggtttgcgcggcagtgcctttatagtatttcccgatcgctcgtagcagcccaaacattaccgccatcattaccaaggcaacccctacaccttgagtaatccgggaaacggtcaccactaccagcacagtagcggtgcagataaaaccaatcgcattgaccatccagcgccgccgcaatatcttccgcttagttttaaacgtatgcatacgtagcttcgtgttccagtatcgcagcatccccagctgagaaagggttagggagatgaaaacccccacgatatacatttggattagacggggagactccgcccccgtcaccgttattaaaaccgctgctactagggcaggaacgcaaatcactggcgatagggaacgcctatcggagcgtcggaagatctgcgggggtaataacctgtcacgagagagcacctgggttagttgcgaaaaccagttaaaagcactgtgagcagcaaacactaagataagagcggttaccgcggtgaccaggtaagccatgaacggatagggcgcaaaaaccgtatgcgcaagttgggcgattaccggaggaacttcataggcagcaagcggagtatcgccggacaatatttgagagttaaaagcgggaacttttaccccggttactttcgccaggtgcagcactgaaagcatcatcgccgcgcttatcgtcccaaatagggcgagtgttatccgggcgttcttaggacgcggcttcatgaaagcaggcaccccgttgctgatgccttctaccccgctcaaggcgacacagcctgcggaaaatgcccgcaggagcagtaaaaatcctcccagaccagtaagtccggcctcataggactcggcgggtaaaagtcgcatagaggcagtgtccgctgcccccagggaaccgagcgcttcttgggtaaagccgaaaacagctaggagggcgattacgcccataaaaagataagcggggatggcaaatagttgtgccgactcccgcagccctgacaggttcagcagggtcaatacggcgatcactgttagagataccaaaacctggtgaacgtttagcgtcgggaatagcgcccccacgtagctggcacacaccgaagtggaaaccgcgatggttagcgaatagtccaccagcagagcactcacagttaccagggaggcagattgccccaggttttgccgcgctacctcgtagtccccgcctccgcgtggatacgcccgcaccacctggcgataggaaataatcaccactgccattaccgcgaaaaccgctacccctacccatagcgagatcccggaggcaacgattcctccaacccctaaggtcaagaggatttgatcgggagcgtaggaaattgaagacagcgcattagaggcaaaaactggcagggcatagcgttttgagagcccttctcgtatcagccgcggtttacgcagagccggttttctccagccgtctttcacgtctttcacatcccgatcatcccactatctgactaaaatcgatagtttttgagctagcagtaagctgaaaatagcagcaaaaaggtttacgctacttgcatgcacttcgtagttttaggctcggggcgagtaggcgcccgcgtcgcccagacccttgatgaacagggacactcggtggcgattattgactctaaccccgaggcttttcggaaactgcccgctaactttaccgggcaaaaagtttccggaatggggtttgaccgggaagtattagagcgcgcgaatatcgaagaagcctatgcttttgcggctatctctaatggagacaacaccaatattttggcggcgcgtattgcccgggaaacctttgggattgaccgggtagtcgcgcggatttacgatattcgccgcgccgagatttatcggaagttggggattaacactacttctccggtatcttggactgcctcggaaatgctgcgccatatgctgccggatgacacccaggtcgcctactctgattccgtctaccaggtgaaggtgctgcggattatccccagcgaaagttgggtgggggtttcgctgcaaaagacccagagactgctagatattaaggttgcctatattgggcgcgatggcgaaccctatttcaacctgtcatccctggtcatccaagagggtgatgagctgatttgtacagttccctcccagcgggcagcggagatcgaacgggcttttaaacgccccccaaagcaggaggtttagatgcgggttgtaatcgccggagccggctccgtggggcgctctattgcccgagaactggttactaacggctatgaagtgactttgatagataaccattccgcgcggatggaagtagcctcaattccccaagcagactgggtgttgggcgatgcctgctccctggagactctttctaaagccgagatcagtcaggccgacgtggtggtctgcgctaccgggaatgacaaagttaatctggtggtttgtctgctggcgaaaaccgagttcggggtgccgaaaacggtggcgcgggtaaacaacgcaaaaaacgaatggctttttgatgatgcctggggcgttgacgtggcggtgtccactccgcgagtaatgacttccctggtagaagaggtagtatccgtggggattccggtgcatctgtttcgtttccacacctcgcacaccaatatgtattccctgacagtcccggaggactctcccttaaccggaaggccgctctccgctctcgacttgccgccttcggtggtgctcgcagcagtgttgcgtgattcgcgcccgctttctcccctcccagataccctggtgcaaggctctgacgaactgctaatgctgtttagctccgaaactgaggaagatttagagcaaataagcgcgctatttgctccacctcccgaggaagtagctgatccggcgcaagaagattaactaggacgcagattggttaatgttctcgcgcagttattagcagttactagttggcgcgcagacggctggtttcaccgcgcagtaacacccagttgaaatatccgatgaggacgaatgcgggcaaacctaagattagtcgcgccgcccccaggggtaccaagaggttcgcgtagtaaagcggtagttccaccactagtcgcaaggtaaaaagccctatccatagccaggtgcagagccgggaaagttcataaaatttgcgagcatgcgcctggcgccaactgtctagtttgccgattgccccagctaccagccagccgattgcaggtcggcgagccaggatggtcagcaacaataccactgagtagaccccgtttatccaaaaaccgaaggcaaaaaaattttcgacctgtccgctgcgccaagcccaaaacacgctaatcagagtacctgctaggccagcgagtacctgacgcagactttgccggcgatgcaggcgaataaccccgaaaatcagggtggccgcgagtgccaggatcaccggcaggcgcaaggattgagtgaagggatagattactaccaccaagatggtgggtaaagtggcctctagcgcaccccaaggcccgccgattgcctctcgaattgagaaatgttgcgatccaagttgcgcccccaatccgctgatttttcccggggttgctatcggattttcgcgaggcaaagaagaatcgtcgggattagtaggatctttgcccgccgcctctacaggattagtggccattagctataaccggttcaatctggaaagttgggttgataacgcacagtccattggagcgagaaataaccattccctggactgccaagcggattccggctttgataccgggaacgctttttcgtcctaaccaaaccacttctatcgaaccggtaccgtcaaataaagtaccagagaaagacccggttgcagtgggtggggggaaagtaactgaacgcaaaaccccaaatagcgaggctttttgccgctcagctacctcgcaaaccttagaggctaccgcagcttcagcggtttcagcttgcgcggtttcgctcgcctcgctacctgttgccaattcgttattcactgctcgcctgcttccagttgttcacgcacctgctgagggagcacgattggtaatagttcgccgggaactcgtgcttcttccccgcgtacgacctccaggccatgcaacacgtccaaaagttgctgccgagtattttcatcttcagcagccaggccgcgcacgattacccgtagcaaccaacgttcaccctcgacgccccacaaaagcaggggtaaagcgccctcaccggcagattttcctcccggaatcgggcgcgccaacactgcttccccaaaggggccgggcagcggaaaaatctggtattcctgagatttaagctgttccgcaagctccacgcggatcttatcccaaagccccccagagcgttgcatcgcgaaagcagaaagctgcatttgccctgttcccgccactatttctactgccaagatattgccataatcatcttgaaccggaaacaattgcaacccaggaattaagggaatccggatggctcccagatctaagaagtcgctgcctcctggggaatccccttcgctatagggaccccggttctctgggggttccgcgctcggctgcggaccggtagcagctggcgaaacttgcgaatcatttgcgccagatcccgcaggaggctgcggtttgaccggatttgaggaatcgctcaggtctgccgcgccttcagaagattcgccctgcaggacgcgtttgcgacgggaaggaaaaaatttcataacgccagcttattcggcacagtcgcggcaaacaggtttgccgtcaaccgcgcccgctaggcgggaacggtgctgcaccaggaagcagaccgagcaggtgaactcgtcatcttgtgccggaatcacctggacagaaagttcctcacccgataagtcagcgccaggcagctcaaaatcttcggcagctgcgttttcgtcctcatcgacctcggctgagccactggcctccgcacggcgagccttcagctcctccagggagtcttgttctacttcctcttcatttttacggggggcgtcataatctgttgccacggttcgtcccttcttaaagcgatgcttgggtcatcagttaagtaaacaatagacgcggggatattaacacttcaagccctaaaatgctagatacgacagacacaccgcgcctaataggcaaaaaatgcctatgaacgtggcaatctcgaagcaagggaacggaggaatatgaaagacctagagctgttggggttgcacccagacggtaatcagctgattctcaatgatgaggaaggcacccgctatgccttggctattacccaggagttacgcgatgcgctacgtcctgagcgtcccaatttggaggcggtaccccaaagtccccaaaaaacagtttctccgcgaaaaatacaatccttattgcgtgccggcagcactatcggtgaaatcgcagacaagtttgaggttccggaagcaaaggtgcgccgctacgccaccccgattttggctgaacggcgccatgccgcaaatctggcgcaggcctgccaggtgggaggggaatcagattctcctcacctgggcgacttggttattgatcgcctagcggcacggggggtttccgcagattctttgcgttgggatgcggttcgcagcggaaaaggcccttgggaaattattttgactttcacccaagatgcccgcgaccttactgctcgctggcatatggaggcgggtgcctctacagtcagcgcgcttgaccaagaagctatatggttaaccgaatcttcccaaccggcctctaaggtatccagtttcgaagagtttttcccactttcatccgcgcaatccgccccaccggaaaaaccggataccggtacggatgcactcttagatgcgctggcagctgcccgaggaaaacgcgacgctactcccgatgtgcaactcccggaagatcaagctgatctagaggaacttgccgatttagaggaggaagaccaccgcgacaccccggctgagaataccgcaaaagagcaggcagaggtggtttctttacatggtaaacccggcagcagcatcccggttgcgcctgactcccccagccagcctacgccagttaatcgcccgcccgaccaagtgtgggactccccggaacctactcttgtaggtaccctctctgaaaccgaggcactaaatctggatttgactaggcgcgccctgtccggcccggcacccgaagcggatgccccttcccgaccagcacctcctcccccggtcgaaaatgagctttccagtgcgccagtccttccgggaatggaaaatgttgaggatagcgataaaactgtcctggcctcgagtgatagccgctccaaaggcaagggtaaacatcgccgttccggtagaaaatctatccccagctgggacgatattgttttcggcaccaagccccgctaaagccaagcacaatgtatgcccgtcctctagacaataatcaaagggatttctatctccgcatcgcttaaagcaccgtgtacccccaccatttttaaaaccccgcggctgtggaaacgcgaatccacgaactggtagttatcgtttgcaaaaatagtgaagtctcctatgcggttcggatcgctaatatctccgtaaacttcccggtaatcagccactatttgaccgcgcccggcaaccagtttttgccactgcacgagcaccagcgctttaggggccttccgggtgcgatttccggcgggatcctgtcctagatactgttccttgaggtgaatatggagggcgcgcggctcccccgaaactgcagctatctgcgaggctaactcgcaggtagctaaatcaatagtggtttccgcggtgacgttgaccatgccgtgatctgcggttatcaccatggcaacatcttggggcaactgggcgcgtaactcagataatccccggtcaatcgcttccaattcttgcagccacctagggtgtgaccatccgcgattatgcccccaatgatccagctgcgaccagtataaatagacataatcggcaccttgtttaaaggcttgcagggcgtgggaacaacgctgggaaagttccgtagataccttgagattcgcgtctcgcaaagttatttcactcagcgtagaacccacaaaatccgggggaactagcgccagtgcctccaggtccagctggcgggcgcgagtgaaataagtaggctggtcgcaccaggaacgcgccggtcggttaaagccttcaaaagtaatcagattgaggacgcgcctagccaccggatcccaacactgataccccagcatcccggtttttgcaggtgaaagcccagtgtgcaggctagttaaggccgccacggtggtggaggggacgcaggttctgactggttgcccccaggcgtcctccgcctgcgtgaggtaaggccgcataaaaggaatatgcccccgcctagctgcaagcagccgctgtcccatgccatctatcgccactaggcagagccggcgcttacctttccccattagctgccgcagcgtggcagaaaactcggtttcctcctgccagttaagcgccccaaaagcagtcggtaaaatatcccaaatccgcattccaggcattgtttcctcacggtgattcatacctcttatgttctcacatccgcgagccaaatctgactagagccaagttttttgctttgataataaggtgagtaaaaagtcgcatgaacccgatcagcctgacctgttttctacagctatgcctgctagcggcgaactcgaccagccagaggccaagaaacaaagtcttaaggccgcgactactactccggtgaagcccaagccgaagaaagctaccccttcggaaagtcagacacctcaagaacacatcacccatatcgatgtgtccgaggaaatgcgtacttccttcctggaatacgcctattcggtgatttatgcgcgcgccctgccagatgcccgggatgggctaaagccggtacagcggcgcatcgtctatatgatgagcgaaatggggttatggccgaacaaagggcacgtaaaaagctcccgggtggtgggggaagttatgggtaagctccacccccacggcgatagcgccatctatgacgcgattgtgcgcctggcacaagactttaacctgcggatgccgctggtggatgggcacggaaactttggttccttagatgacggcccggcggcggcgcgctatacggaagtgcggatggcgccgaccgcgcaagatatggtgtccaatctagatgaggacgtcgtagattttgttcccaactacgataaccagttcatgcaaccggcggtgctcccggcagctttcccgaacctgctagtaaatggcgccaatgggattgcagtcggaatggccacctacattccccctcacaacttgggggaaaccgtggccggcgcgattcatctgctagaaaatcccgaggcaactaccgaagatttaatgcgttttattcccggtcccgacctgccaggcggcggaatcattgtggggctggacggtgtacgccaagcctacgaaaccgggaggggaattttccgcactcgcgccaagacctcgattgagcgagttactgcccgcaagatggggattgtggtcaccgaactgccttatatgatcggtccagaaaaagtcattgaaaaaatcaaagatggagtgcaaaagggcaggataaaaggtatttctgcggtcactaacttaactgaccgcgaccacgatatgcgcctagttatcgaagttaaatccgggttcaaccccgaggcggtgcgcgccgccctctttaagcacaccccgatggaggattctttcgggattaacgcggtagctttggtcgatgggcagccgcgcactttggggctaaaagaaatgctgcaagtgttcctcgatcaccgcatggagattgtgatgcgccgcagccagtaccgcctgcgtaaacggcaagaacggctgcatttagtgcaagggctgctagtcgcagtcctcgatattgatgacgttattcagattattcgcgcctccgaggatgctgctcaagcaaaagcccgcttaatggaggctttcgacttagatgatgtgcagtctgaacatatcttgtccctgcaactgcgcaggttaactaagttttctcgcctggaattagaggcggagcgtgaccgcttgaccgaagaaatcgccgagctggaagcgttgattgcctcccgagaaaaacggcaagagctggtggtgagtgagctgcgggaagtagcccaaaaacgttcggatccgcggcgaacggtgctgctggcagaagagggcgccgcccagttagccgccgagcaagacgcacctctagagattcccgatgagcctgccacggtggttttaggggcaggcggcctggtggcgcgtttttctggacacgaaccttttgctactgacggtcaacgcgagccctgggatgcaattattgctacagcccaaactaccgctcgcggccaggtgggcgcgattagctccctgggaactttatataaacttactgccctggaagtaccagctttggtacggtcagcagcagctccttcactgcggggtacgcctccgatttcacggctgctcagcctggaggaaggcgaagaaatagtggggctggttcccctggatgaagaaggaccgacttggtgggcggccacggctgctggggttattaaacggatccggccgcaggtgttggctacccaggattcttattccataatcggtctagacagcggtgaccaggtggtggcagctggcagtggaggcgatgacggtgctttcgtgctgatttcttcggcagcgcaactgctgcgcaccccggcagataaagtacgcccccaaggacgctctggccagggcatttccggaatgaaactggcagagggcgaccaagtaatcgctgccgctttggttagtgaagacgacctagaatcttccctagtggcaacagttgccggaatttcttcttcgggccccggtagcgggcaaaccagtgcgaaggtcactcctttgccacagtatccccaaaagggacgcgccggacaaggggtgcgctgccagcgtttcttgaagggtgaaagccgcctgtctttggcggccatcaccgctaccccgccgcgcgccctcagcaaagacggaaccccgctgtcgttaccggcgcaaactgacaagcgggacgcttctggtagcgggctgaagcgacaaatctatttcttgggttaaggggctatcgctttcttggggcaagttagttgggcaataggcaagtaaagtccctagttgagggagttattgtccgtttcagatgcgggagtttcaatcgcgtactgggtagaggttccgatgactttaaatccggcctccaagaatagacgccgggtgaaagcatcagcagcctccggcaagagagctccagtagtagcgaacccccgattcttaaacgctttcaataccgacgcgattaaagattgcaagatggcggcattttcccatcccggcagtaaccccagcagatcaatatagccttgacgattccccaccgccttccagtcttggcgatagatggaagacagcgcgaaaccggcaatctgggagcgatcagtggttttatctagcgccacaaaagaacaatctggagtgaaagctcctcggcgagtagcccaatcttccgcgctgtaacccggccccggatttcggtcttgcaggatccggtttaaagtatgacgcaacatttcatctagttcctgattccaagccacaatctggaacggataaggcagttccggcagctttataggctcggtcaaatcccgggaaacatccacgaaagaagcagtttgctgatatccggcctctaggagcaacgcagacaggtcaggggcaatatcttccacatagaatagggcgcgtccggggcgcgaatgatcgaggagggcgcgcgcctgatcccgctgccaagctatcgatgcgcgtcctaaaccttggccgcgatagcgcggatctaccccaccctcgcagaccacttcgtttaccagtagccgcggacgcacctgcgcataggcgaccaggttgttttcctggccgaaggcaccgatggtacgccaccgtgagggtgccgcaaaaaactcttctacctcagaaatcgctgtcctaaagggaggattgtcgaattcttcaatccgatggatcaggctccccatttccggtacgttatcgggaccgagattgcgccaatcatattttccggtgctcttcggcagcgaccattcctgcccgctcatcacagctccaccgtataaatcatgcgcgcccccgccagtttgaagccgcaggcggcacacaccccagagaggtcacccagggtcgggtagttatcttcggcgaatacctgtttatatcctgagtgtgcgcaggccgtgagcacccgggaaagtacctgttttaataccgcgaaatctgcgccgtggttatcggcattttggcggtcatcaccgaaaatatctaccgccactgtgggaattatttcttcggatgcaccctcagattctaggcaactgctttggcaaagatcccggtaaaccaccagacaataagcaagcacgcgaccagaattcatagaaacagctgcaaaggacaaatcgggagccagattcgataaaactcgcccccaccagcgggaagcatcccccttatcggcatataggcgcgcggagttagctacgtgcaaagcttttatttcttcccagtgatcgggggaaagccggcgggcagaaatgatccgcacatctttcgtagggaacttttcttctaaggaggctagcacagccgggtctaagcggtgcgaaaaaacttttatggtgcgttgagcagagaatccagcagccgcatagagcattcgccgatccccggcgcgctcgtctactacattgcggatttgggcgggccgatcataatcctcgccgtagtaacccaacattagttcccgagcacgcacatcttgccaagccaacagggcgcgacctattccccgtcctcgccaatgctcggcggtaactgcaaacagatcggcgcgggcatagcttttttcgtccggctgtaaagtgaccgacccgaaagccgccaagttgccgcgcgaatctagtccaatcagacagtcttgcagttccgggcggctcagcgcctgggttaaccgactaatctcgccctcggaagtaggacgtgccggatgggaattcttctcagttaaatggattagttcccgaattttccaagaatcagtttcgcgcgagggacgccaatataaccccagatgaaccgggggtaccggggcagctggtaggctccctaaccgttcgcgcaaagttgacatacttttatcttactggcgcgcaagcagcaaaccgaaaccgttaagcatctatttgttcggctgccagttggtctgcgccggccacgatgaattcccggcggggcgccaccgtggatcccattagcagctcgaaaatgttttcggcttgcgccaacgcggcttcatcggcgaaagtgatttgccgcagggtgcgttttccgcgttgcatggtggtttctgcaagctgagaggcatccatctcgcccagacctttatagcgctggataggttctttatatttgcgtccactcttggcgagggcgtgcaggcgctgatgcagctcatcctcggaataggtatagataatttctttctttttccgcccttgagctgggatttcgatccgatgcagcgggggtactgccgcgtagactctcccggcagcaatcagggggcgcatataacggaagaatagggtgagcagcagggtgcgaatatgggctccatccacatcggcatcggtcatcataatgactttgccgtacctggcagaatccaggtcgaagctgcgaccagaacctgccccgattacctggataatcgctgcgcattcggcgttggatagcatatcggaggtggaggctttttgggtgttgaggatttttccgcgaatcggcagcagggcctggaaatccgctgatcgtgcctgtttggcggtacctagcgccgagtcgccctctacgataaacagttcacagtcctcaactttattggagcgacaatccgctagttttgccggtagtgaggaggtttcgagggcgtttttacgtcgggaaatctctttttgatgccgcgcactcactcgcgcccgcatctcccctactactttctccatcagggcaaacacttgctgcttgtcgtcgcgtttggaggaagagaacttcttttccagccactgggtgactgcgctagatactgcctggcgcacttggggggtacctaaaacttccttggtttgcccctcgaactggggttcaggcaaccgcacggtcactaccgcggtcagccccgccatcacgtcctctttttcgattcggatcttggcttctttttgggtgagtttcaggcgcttcgatttcttatttttatcaatctggctgcgcaatacccgcaccagcgcgttttcgaatcccataatgtgggtgccgcccatgggggtggccacgatgttcacgaaagaacgctcaaccgtgtcatagccgttgccccagcgcatcgcaatatcaatatcgcaggtgcgttcgacttcgaccgggcgcaaatgtccgcttttttggtctaactgttgaatagtttcactgtaggtgcgctggtcgcggatacaccaggtgtcgataatcgcctgatcgggggcgaggaaatcgacgaaatcttcggttccgccctcggccttgaaagattcctctaggggttcttcggggcgttcatcgcggcaaacgatggttaaacccggcactaggaaagcggtttggcgcgcgcgttccagcaggtgttcccacgagaatccggtggaggcggttttggggaaaatctggaaatctgcccaaaaacgcacccgggttccggtctttttcttgggggctttccctattactttcagtttggattctttagtgaatggcttgaacggcgaggtaggggtgcgggattcggtgtcgtcaaactcgccgggctctccacgcaggaaagacatttgataggttttcccgcctcgatctacctgcacatctaggcgggcagagagggcgtttactaccgaggcacctaccccatgtaggccgcccgctgccccataggagccggtgccgaactttccgcccgcatgcagcttggtatagacgacctccaccccggatagccctaccccggggactttatctacggggatgccgcggccattatcggacaccgataccgaatggtcatcgccgatagtgacctcgatctggtcacagtacccttccagggcttcatctaccgagttgtcgatgatttcccacaggcagtgcatcagcccgcggtgatcggtggagccgatatacataccgggacgcttgcgaactgcgtcaagtccttctagtaccgacaggtgccgggcggtgtagtccgatttcgtctttgtagccacctctctagtttagagggtggcgcttttagggttgctagcggctttccgagggcgcgcttttgtgagggacttcccgtccgtttgggggcaactttctatgcttttagagtgttggttttacctccagcggaataaatatatgagttaataaaggtaaagaaagtgcctaagtgactgactttagctagtccaggaagaaggaatcgccttgaaacgcgtagcaaagatgctaatcggtacgctattagctgtattcgcgctaacaataccggccgcacccgcaaatgcagccaacgactatctgcttgatatgtctatagatgaggatttagaagttcatgcatctatcaacattccgttgccggatgaccccctgagttttctggggggcagtttaaattgtgggttgctaaaagcatcgactgagcttttccccggaggagtcagcgatctgagtaacttcaaagttgaaagctgtgaccagcaagggaaaaacatctctttggaagtttcggggcaggcaagagagggcgaccacagcgctagcggctggaaaattaccaaggatgaaattaccttgtccgttcctcccaacattggtgcggcatcagatgcaaacgagagtaatatcggcggaatccggattaccttccccggaaaagttaaaagtgtacaacccaatattggatccacttctggcaatagttggtcagtagataatcctagcgaaatagacgaaacagtaactattactgctgaccgtcatggctccaacttggggttgattctgggaatcaccatcccaatagtcctaatagttgtagcggcgattgcggcggtggtagtgataagaaaccgcaagaataagcaagcttctactcagtctatgccaggatatggcgcctatcccccgccgcctgtgcccggaaactccccaaaccctgtccatccgcaggtaccgaggcatccggcttcagtcgctccggggatacaggaaacagcgccttctaagcctggaggtataccggttacacctggagcctctgggattcctgcggggcaaccaccaaggcctggagtttcggaaacacctgatgggcagccacctctgtctcaggctcattctcccctacctaatccgggtgacagatctggatttgagcctgctgtctccgcagatgtgggtaccccgaccgggcagccttttatgcccgatattcctcaaccctctgtgtctaaggatttggtaatgcccggggagcagccgcacgttcctggctctccacaaatatcggctgagccatctcctaagaacgaaactgcggaagcaccgagcgaacatccgccccgggctcaagctgaggggttgcccgagaatcagccgtctacttcggacgctggcagaatgtctccagagcagccgcctgctcctggcactgctcagcctcctatgcccccagtttctcctcaaaatggatatcctccccagtacggttacttcccagctccaccagctatgcccggataccccgcccgacccccaatgccgggttatccggcgtcagctgctccgggaatgcaggaagcagcgccttatatgcctggaggcaaaccggcagcacctggagcctctgggattcccgcggggcaaccctccatgccaggtagtgctacatccccgatttcaggcgcgccgtctcaaggtggatatccgcccggatacggctacttcccagctccacccgttatgcccggtaaccccgtccaacctcccatgccgggctatccgccatcaggtacacctggtgcgccgggagctgcgccctatcccccgaatattcctccgcaaggacaagcgggagcgcccgtgccaggtggctactatccctatcagtatccttatccctatccgcccgctaatcctcaaggctcgcaagctggatacccgatgccacctcaaggctacggaacgcctgccccaggattccaacctcctgcaactcccccacaatcaggagaaccaggaaatccgggagaatcgggacaaactgccgaatcccatagcggacaacatgcatcccactcgccgcagcctggacagtccgggcaacccgcgaaatcccccgaacccgcacaatcgaaagaaacaggagaaccgggaaattcgaacgactcggaacaagagctcccctctagcaagcccaggcacgcagccgagccagcgcaagctgacctgacagttctaaagacagattctcccgaggcgatagcacccaagcattcgagtccagccgaccaagcagagcaacctggacagacaaactaatagggaaaagttaaaactccgggtttagcccagttcaaaggcaaatagctagatggcgtctccagcttaacgggcgcgggacagcgaagttaacggggcgttttgggcttcctcgaaatgcagctgctcggtgttatccacgatttcggcaccactttcccgcaaagccggcactagggcgtgggcgtgatgggcgcagaaaaacagattgccggcctccaggcgggcaagaacccacgcctgcgctccgcaggtatcgcaacgatcagtcgcatcaaaaacataggtttgctcactcatgtcctcattgtctactgcgtacgagcggaagtcacgccacggatcgagctttcgcgcctggcagaactaaaccgccgtccttgccagtagcaaggacggcggaaagttaaaagtgtgacgccgctcctaatccaggtagtcgcgcaacacctgactgcgcgaggggtgacgcaacttcgacatagttttggattcaatctggcggatacgttcacgggtaaccccataaactttcccgatctcgtccaaagttttcgcctgaccgtcacccaaaccgaaacgcatcgacactaccccggcttcccgctcggacagggtgtcgaggacgctacgtaactgttcttgcaacaaagtgaagctgactgcatcggctggtaccaccgcctcggagtcttcgatcagatccccaaattcgctgtcgccgtcctcgcccagaggggtatgcaaagaaatcggttcccgaccgtacttttgcacttccaccactttttcaggcgtcatatccagttctttagctagctcctcgggagtaggttcgcgccccaaatcctgcagcatctgccgctgtacccgtgcaagcttattgattacctcgaccatgtggacgggaattcggatagtgcgcgcctgatcagccatcgcgcgggtaatcgcctgccgaatccaccaggttgcataggtagagaacttatatcccttgctgtagtcgaatttttcaactgcacgaatcagacccaggttaccttcttgaatcagatccaagaacaacattccccgaccggtgtagcgtttcgccagtgacaccaccaaacgcaagttggcttctagcaggtgattctttgcgtgttgaccatcaatcgccaaagaatgtagatcccgacgcatcttagaagtcaggttttccgattcagtttccagcttgtgctgcgcataaagacctgcctcaatgcgccgtgccaaatctacctcttctgcggcgtttagcagcgcaactttcccgatctgtttcaggtagtccttaaccggatctgcagtcgctcctgcaaccgtgactcgttgcgcaggttcatcggtttcatcagaatcagaaacggtgaaggcattgcctttcttttgccccttagcattagcttttgcctgggcaatcgccttacttaagccttcagcggcagtggcgggagcagcttcttcctcttcttcctcatcttcttcgggttcgcgatcttcaccatgcttttcgtcatcttcatcttcgtcgctatcgtcgagctccgattcgatgtcaatttcttcttcgctgcttaaatcctcgtcaccaggttcaaccgtatcttcatctacctcggcatcttttaccgtgagctcttgctcttcatcctgaagagtgctctcaatttccttttcttttgcgctagttttcttggtggcagtcttcgccgtgctcttcgcaccggtcttggtggcagcagtcttcttagttgccgacttcttggctgttgctttcgtcttggtttcttcagccttcgccgaagcctttgccggagctttcgcagcggtcttggcggtactggcttttttagccgcggtagttttcttcgctgcggcggtcgtcttagttgccgccggtttagaggtcgcggtcttcgaagtagccttagaagcagccttagtggtggtgctagctttagccgcactggtcttctttgccgcagcggaggtcttctttgctgccggcttagaagctgcagtctttgccggagccttcgcagcagtcttggcgacactggcttttttagccgcggtagttttcttcgctgcagtggtcttgctggctgcggcggtctttttcgcagtcgtggtcttcttagttgccgccgttttcgaggcagcagtcttcgctttagctgcgctagtagtcttcgcagcagcggaggtcttctttgctgccggcttagaggccgtagccttcttgctggtagcagcctttttcgccgtagtagttttcttggctgccggtttggaggacacagtcttcgctgtgccctcagtagtctttgccagagctttcgcagcggtcttggcggtactggcttttttagtcgcggtcgtctttttcaccgcggcggtcttactggctacagcggtcttcttagccgtagtagtcttctttgctgccggcttagaggctgcagtcttagctgatgccttcgaagtagcggtcttggcagtaccggcttttttagccgcggtggtcttgctggctgcagtggtctttttcgcagcagtagtagttttcttagctgtagcgctcgttttgctggctgcagtagtcttttttgcggtagcagtcttctttgttgccggtttggacgccgccttcttggtggcagcagtcttcctagccgtcgatttgctcgatgactccgaagccttagttttcgctgcactagtagtttttttagcggtcgcggttttgctggcagcagcagtctttttcgccgtagtattcttcttagccgaggctgtagtcttcgccgtgctcttcgcaccggtcttggcggcagtagtcttctttgccgcagtcttggtggcgggttttttcgccgcgctcttagcggtcttagcagcagtcgttttccgagtgctggcggtggcactagctttcgaggaagttttcgcgctagattcagattgagcaggtttagtagtcacagcgacctttcctgattcctaaacgttttcatagagaatgctcaacaattataattcaataccacactttctagcacatatccagggaagtttcgcggccagagtagaacacgcagggaaaggaagtagcagctaatgcccactgaacaggagttttccacccagattgacgaactattaccgaaggcgtggcagagcgggctgcagccttggcgcgacctcgagggagtggaagaattatttcaagtgggactggcagcactttccggaggtaaacgcacccgcgctcgcctcgcccataccggctgggccgcgatcagcggtaaccattcccgccctcccaagcaggtttttgacctgggagtggccctagagatttaccaagccagcgccctcgtccacgatgacattattgataactctcccctccgacggggaaaagatgcagctcatattagtttcgcgaaacagcatctcagcgagaaacgccaaggcaattcgcaagaatatggcagttttgccgcgattttactgggagatttactgctggcggtagccgatcaatgtgctttcgcggtcacctctgcttgcaaagacgctaatgcttttttcgccaactggaccgagatgacccgggaagtggccgccggtcagtacctggacttgcggctcgaaactgatgaacttgatcccgctgtagcgcgagagcgaattttaacggtggttcgccacaagtcagggcgttattcggttgcgcatccgctaaccttgggggcgcgcctagctggtgccagccccacccaactgaaaacccttttcaccatcggggaatactggggagtcgcctttcagctttgcgatgatgaactcggagtgttcggtgaccccagccagactggaaagcctgcaggcggtgacttaaccgaagggaagaaaaccgcattgtggtctctagcggaacagatgcttagcgattccgcgcggcaggggttgcattacgtgtttggcaaccgggcagctactgccggacagatttcggcggtaactgaagccttaactgtgcaaggggtaaaaagccgacaccgcgaactaatcgcagaatatgccgctaaaggtgatgccctagtaacaagcggtgattttgatagtgctggccgccaggcactgcttaagctcggacgggcgctggttgagcgcgaatcctaaaatattttgcttaaagagcctgcatggctgccactgaattaactttggtgtggcttccggcgcgcaataaatccagcgggcgctgctcgtctaataacggttgggcagaaagcacccactcggttgcctcttgaacgctaaaacccccatctatcagggttagcatggtgccgggcagacgctcaatcaaagtccagccctgtggggtttccagtaggctatccgctacgatctgcagttttccctgttcatcaggtaaggccaaaaggcgatgttcttttaggaggcggtgggtacgagtaacttttaccccgaggcgctcggcgacttccgcgaaactgatcatatccatgttcttagcctatctaaggtggcaagccggttcctacccgcgccgcttaccggcaatagggcaagcgcccgctaggattgccttatgagtatcgatccggaagctagaggacgccctagcaactccccgcgggaatcgtccatcccgcgtgcagctggaaaaaacagcgagcagattccggaaatagagcagcgtgcaggcgatgaagaccagatgttgaaacgtctgatagatcagcgctaccggattttaagcattatagataccggcgggatggccagtgtttaccgcgcccacgacgaacggctgggacgcgatgtggcgctcaaaattatgcatccccacttggcaaacaccccctctctagtagagcgtttcgaggcggaggcgcgttcagctgcccgcttgatgcatccggaaattgtgcagatttttgatcagggaacctggcggcggcgcccctacctggtgatggagtttattaacggaccgaacctgcgccaggtactgactaaagaaggcgctttgtctttaggacgtgccttagaaatcacggagcaagttttagaggctttgcaggccgcgcatgggatgcagattatccaccgggatattaaaccagaaaatatcttgttggctccctccggaaaagtaaaagtagctgattttggacttgctcacgcagttaatcaagctactggcaccactaccggatcggtgatggggacggtcacctacctggctccggaacttatttcccagaccacctcggatgcccgttgcgatgtgtattccgtggggattatggcctatgaactgatcagcggggtgccgcctttccaaggcgataccgcgattcgtaccgcgtggcagcatgtaagcgaggatgttcccccgctttccgatactgtgccttggattcccagcgaggtcgatgacttgattgcggcgcttactgcccgcgatgcccaagaccgcccggtcgatgccggagctgctctacagctagtgagggcggtatcggaatgtctaagtcccgagctgagtgaacggaaagctaagcgcccggtagacctgccccaagaaaaagaaactgaacgcacccccctaggaagaggtggtactgcagtgctgccggttttaccggtcgcctccccgcaagtacctgcagctccagttcgtcctcatggcgcgcctgctcacagtgattcttccgctaccccgcctgtctccaaccaaggaaaatcagtagctgtggttgcagctgacagtgcggaggagactccagacacccctccccaaaagaacagcaaaaaacgcttggtagctgcggttatcgcctgcattttggtgctggcgggagctgccgctggatggtattttactttgggtcccggagggcgagtagcaatacctaatgtggaagggaaatccgcggcacaagccaaatccatgctggtaaaagcagagttaaaggtgaaaattagtcgcgagtattccgatactattgcccctaataaggcgactcgcactgatcccaaagccggcgaaaaggcatggaaaaagtcccaggtaaacttgtatatttctcggggaattgaatacgtaaaagtccccgatttaacgggtaaagatggtaatcaggccgcgaaactacttataggagcgaagctgaaactagccggcaccagcgcggaatactccgatgaagtcgaaaagggaaaaatcattgctacggatccgaaagccggtactactttacgtcaccactccaaagtgaaagtaacaatttcaaaaggcaaggaaccgattaagttaccggatttagccggtaaaaccgaagacgaggtagcggaaacacttagtgatctcaagttagagatggaaaaaaccaccgagttttccgattcggttccgcgcgggaaagtgatcggacaagaaccggaggcaggaactaccgtttaccatcatgaccagataaaagtgcggatttcgcaaggtccagagatggttgaagtccctaacgtaaccgctttatctatggaggaagctaaacaaaagctcacggatctgggattccaggtgaatgttcaaaaacaactcctaggaattgcccccaatcgggtttattcccaatcccctggtgggggtaccaaactaaagaacggatctacggttactttgacctacgtctagcgagagactttccctgatctagatagtctgcatcctcgagctttagcaggacgcagctctagcgcccctagaggtctggtctaaaccgtgtaaccccagggctctaagggttcgcgcagaggattacccaaggtgtcgtggcgtttttgcaacatttccgccacctggaaagccagttctaaagattgctggtgatttagccgcggatccactcgggtttcataacggttcttcaaggcatcttctgtcagtcgttcactgcccccgattacctcggtaacatcatcgcctgtaagttccacgtgaattccgccaggtatagtgcccgcttcttggtgagcggcaaagaaactggccacttcctcgaggatgcgttcgaagctacgagtcttatagccggaggaagattgaatagtattaccgtgcatagggtcgcacatccaggtgacgggccggccatcacgcttttgcgcctctaacagcgcaggtagcgaagactttagtgcctgcgcccccatccgggtgatgaaggatagacgtcccggatcggcctcaggattgagtttatcttgcaacctagctaaatcatcgccggtggcgtcgggaccaattttcacccccaagggattggctacttgcgaaagttgctccacatgagccccatctgcctgacgggtacgctccccgatccacaggaaatgcgcagaggtatcgtaaagatcacctgtacgagaatctaccctggtcatagcttgttcatactctaaaagtagggattcgtgggcgctataaaagtccacggtgcgtagttcatcggcgctaaccccggcagcgtccataaaggaaatcgcgcggtcaatatcgccagctaaaacatcgaaacgtttataggcaggattagaagtaaaaccgcgattccattcatgtacccgatgtaggtcggcatatccgccttgagtaaaggcgcggatcaggttcaaagtggtgcccgaacgagtataggtatctagaagccgtccggggtctggagtgcgagcctcgggggtgaattcgaaagagttgactgcatctccccggtaagacggcaaagtaactccgtcacgggtttcggaatcgctggagcgaggtttagcgtactgtccagccatcctccccatttttacaatcggcaaggaagccccataggtgagcacaattgccatttgcaaaatggtctggattttcagccgcacccgattagcggttgattccgcgaaagtttccgcgcagtccccgccagtaagcacaaaggcgcgtcccctgctggcctctgccaatagttcttttaaggcatctacttcccccgcaaacaccaatgggggacgagtgcgcagatcagctagcttttctcgtagcttgtcctgatctggatagctgggctgctgggttgcggggcacccccgccacgaattcagagccttagttgttttctcgtccacgaaatccaccctagtaagttttagattttaagacgaataaatccgagagatggacttattccctgtttagtttgctgtggcaccggtatttatttacttctttgcccacgtgcttgtcatagggaggcgccattaacaccttccctgaaaaactgacagtaataatttctttggctctcgccgcacgcggcgagagccaaagaaactttagttaagcgaatatcgtcttcacttagctgttgccggcaggctaagcggacaatggtaaagctacgcgggctctacttcctgcccgatgttagccatcatttcctggaaccagggggtggtaatatcgaaggctttaccacccttgatccgggagaaagcgatcgagctcagcagatccccattttcttcatcatgaccaatcagaccggctttgccttccagtgcgcactgcaccgcatagtcggtcatggatttaatcagccgcagatcttctactcccgccgccgaagcccgagagaagtaaccggacttttgcaccatgactttttcagctccgatgcgctcagcgaactggtgcgcaaaccactgaccgggattaatcttgtctagctgcacgtggccaaagggatcgcggggaactgtttcccctgcctgctccatctgctccacgatttcgctgaccccggcgccctcagaaaggaagatatttacgtttccgacctcgtccataacttttcgaagacgcgcagactcgccctcgatatctatatgtgcttcaggcacgaaaatggcgtgaatatcgcgagactcgcgggtgagccccatggaaggcaaccattctttcttgtccaaaagcttgcgataggaacgggcagtcgcagctgtgagataaccgcagtgacgtcccattacttcgtgaataatcaattcccgcgggttagactggcactccccgattacgtgctctgcaaacagcgctccgttatcggctgcggtccaagcccccagggattgccgcaccggaatgatgtcgttgtcaatagtcttcggcagccccaccacggtcagttcatagtcgtgttcatgcaggtagtgcgcaagatccgcggcggtggtgttggtatcgtccccaccgatagtgtgcaggacatctaccccgtcctctaccaagcgattagccgcaaattccaggggattaacgccctctttaaccagaccgcgtttaaccaaatcttcggtgttagtcagcttgacccgagagttaccaatcggggaaccaccgtattcatgcagcaggccggcatttttacgtgcctcttcgtctaccacaataaaattcttggaaagcaacccgtgatatccgtgcttataggcgatgatttcaacttccggggccagttcggtataacgttcaatcaatccgccaaccgctgatgataggcaaggtgcaaagccaccggcagtcagtagtgccacccgtttaatggtcatatctcctccaaaagatttatttggccagttttggccccgacatttaacattctagtcgatattccttaaaggactctaggagatcggcacctttcccatccatacaggtaaaacaggataacccagcttgggaaccaaccctatccacagctggtgggtaagttgcaaaaaatagcggaagactccgaggactccccagcggggtttactcttttggttcttcgtcctcgcttgcagtttcttccggaggctccggcacctcagttttaggagcctgcctgcccccaggagcttccactttcggctcgacggcgcccgtgtcctcgtcatctttcttggcggctagcgccttttttacgtccgctgcatacagatccacgtattcttgcccggataggctcattagggaatacataatctcgtcggtgatcgcccgcaacacataacggtcattttccatgccctggtagcgagaaaagtccaaaggctcaccaacaaccactccgatgcggtgcaaacgcggaatccgggtaccaatcggctgggcaatattggtgcccaccatcgccaccggaatcaccggtgcccccgaacgtagcgacagacgcgccaagccggttttaccacgataaagtcgcccatcagggctgcgggtaccctcgggatagataccgaatagttcaccctcctgcaaacgcgccaaccccttttgcagggccgcctgggatttctttcccccggaacggtcaatgggaatagtgcccacctgggtcataaaccacttcacgaaagcgcctttcaggcctttaccggtgaaatagtcagctttgcccacaaatacgacttcccggtcaatcattagcggcaaaaagaaagaatcaatcaccgccagatgattggaggccagaatcgctggcccggtctcgggaatattttcggctcctttaatccagggtcggtacagaacctttagaatcggtcccaggattactttcagcatccggtaaaacacgtaagcttccttcccgcccgggctaactggccgatccctaaagaccggctagactaacgactatgaaactccccaagaagtggggggcgcatcgccgccgcaacccaagtcaacgtcgcgtagatgatgaatttttagatattacatctaggttagatgataccggtatttttgcgcctggaccgcgagattacgaattatccgagccagatgagcagtttcaaccccctacgctgcctgccagtccccgtccccgcggagccatgcgcgttttagtgattaccgtcgtagtgctaatggcctgggtggccacctacatcacgggagtcaccctgccgttctggcttcatgtgttggggttcttagatttaacgattttttgcgttctcctcatctatctgcgtccgcgcggccgtagccccttgaccaataaatggggggatgacgatggggcgagggtgtgagcgctcaattttttggcccaccttcgcgcgccctgaagaatcacctcagcactctgttaccttccagtggtgaactggcaccccaaggcgagttttcacagctaggaaccccgctggcggaatgttgtttcctggtggttgacctggaaaccacgggaatgggcgcaggtgcggaaatcaccgaaatagcggctgcccgctactataagcggcgcctttgcggaacttttcgttctctagtgcgaacccgccgttcgatccctccaagaatagtggcactcaccggaatcactaactcgatggtgcttgctgcggagcctttggaggaagtttttccgcgtttccttgctttttggagggccgatcaccccgactctcctccggtaaataccctggttgcccacaatgccagttttgacaccgggttcttgcgccgcgccgccgagcaactagatgctcccctacctcacgccctcaccgtagataccttggcgattgcccgcctgctacttccccgtcccttcgtcgccaatcaccgcctagctaccctcgctaaatattttggcgcggaaaagcccactcaccgcgccctcgaagatgttttagcaaccgtgacggtgctgcaagggctgctggatttggggcagggagccggtctcacccacacccaagattttcgggttttacaaaaggtaccccgccagattcgggcaaaacgggtgttgggagtcaatctaccggagcgccctggggtctatatctttgaggacgaggaaggaaaacctctctacgtggggtcggcttctaacctgagaacccgggtaggtagttacaccacggtgggtgaaaaacgtcggcaaatgcgagaaatgttagctgccgcgtgccatatccggcattattgttttccccatgtacttttggcgcggctcaaagaattagacttgattgcccggcttaatcccccattcaaccgtgccagcacccgtcctgataaatattggctgctagagctaaccgatgaagattttccccgcctgagactttctaagcgagtagagcgcgaaacccattcccgcatcctcgggccgttttctacccgcaaaagcgctgagcgagtccgccgggtactctcgcagcagtggagcctgcgcacctgcactcaagagatttcccccggagctcctgcggacagttgttatttggaacagttaggcgcctgtcttgctccttgtcgcccgcagaaccaagaaaagtatgctcagcacctaacgcagctggctgctaataaatccgccgcggaactgactgcggttgataccctgctagaaaaagttcggaacttggcagaaaatgaagaatacgagcaggcggcagtgatccgcgaacagcttttttcgctgctgcgcgcgggtgcggaacaagaattattggccccgcttctaggcgcggaagaacttatttttgccctccccgctccccacggaggatgggtatatgtggctctcgcctacggaaaagtagtgggaactgcttttacctgtgctaacgcaccaaaaatcgcgattgaccaaaccgttgcggcactagcggaagttttcccggtgagcgccccgcacttccttggccagggcatcctttgggagcagctacatgtcttggcgcagcaactttatcaaccgggaacccggatcgtgcggatacggggtacagcggctttggcctggcctgcccagggaatgctttctcgcacccagttacgggagaccttggctcaggctagaaaaccgtattctttccaactatgagggcggagaccaggatcctaagcagcgaaaatctccttgaaattaaaaatgcttagcgcagcagttcagctacggcctcttgcagctttagggggttgaggggacgctccaccgctttggtagctcccgcccatccgacaagccattcatcttgcggacgcgcggtcaaaatcaggattgggggcaggttgtcattttcttcagctagagacttcgctaccgaaatcccagaaatcttagtggcttccccatcaagaatcagcagatcataacgattatttagtaccttgtcctgggtaatcgtggcggttgcagtttcatcccaagttattttcggcaaatctgccgccggtttaattcctactgcttcgattacttgccggcgcacctcacggtcatcgctgtacaacaaaatctgtaggttctcttccgattccgccattttctgcttccttaggtaaatatttaaaaggacttttggctttcattgtaaccgactatcacgcccttgcattgtccgcttgtctaatgtcatccccatttcctaaattttccgcgcatcatcctcctcacaaaccgggattagccggtaaatacgcgctcgagcgctgcaaaaataggacttagcgcctagactagataacagatgccatctgaccggagggaagttaggtggacaataacaatacaaaaggagaaccatttatatggagaaatacacgcttccggaactgccctatgattacgccgctttagagccgcatatttctggcaaaatcatggaacttcaccatgacaagcaccacaacacctatgtgaacggcgtaaatgccgccctagagaaactggcagccgcccgcgaagctggagacttggcagcagtcaaccagtactcgaaagatctggctttcaatctgggtggacacaccaaccattcggttttctggactaatatgggcccggattgcggcggggagcccgagggcgaactagccgcggcaatcaccgaaaacttcggttccttcgaggctttcaagaagcatttctcagcggcagccaccggactacaaggctccggctgggccgtattggcttgggattccatttcttcgcggctcatcatcttccagctcttcgatcagcaaggaaacgtgcccgtcggggtaactccgctgctcatgctggacatgtgggagcacgctttctacctggactaccagaacgtgaaagctgactacgtgaaggcctggtggaacgtagttaattgggaaaacgtttctgctcgtttcgaaaacgccgaaaagaactttaagtccctaatcaacctggcctagcaactaacgcgggggagcgatttcccctcctgcccaaaaattcgggaagcgctaatacgcgcttcccgaatttttatgcccaccgcacctactcgggaaaaccgctccccccacgtatttataccttcccggaaaagtgtaaagcgggggaaaagtttttcccacgcggatacgatttcagattagggtcgcggccggtaaaagatacgagaggggcttgacctgcggagcaggtcacggggtccccggagtgcttttaccgagccagacccggattttacaatcggatttaaactgtcacccgaggcgggtactggtttgtttcgccccaatgtcgtagatagcaatccgcgctggatgtgccttcgccccttggcgcgcgccttctgcgggctctatcatcaccatccgcgagccgatgggtacccctaagaactgcggggtggtctgcacggtagcgggcgtagacaccattttcccgctgacccaggagctggatacctctccccatttaccctgctgatagctggcggcagtcaaatgtactcccggaaaatcatccggttctagtttcggtcccgtgccttggtaaagcatgattacctgttttaactgcggagccggcatatcgggatcgatatccagctgcggctgactgccggggccgccggtaatctttactcctttagggagcttctcgaaagactcgtcgattttcttcgcgtgtttcagtgcggaaatatcacttaaatccatggcgctgatcaggtcgatcacaaacaccatagtggaatcggcggggattctcttggcggcttcaccttggaaacctaagcgtggaggtacggtaagctgcacccgcgagccaactttcttgccgatcagaccctgtttccagccggcgataacgtcactcatcgcatagccttgggcagagtctcccattctgaaggtggtcatcacggtttttccgtcccacaggttacccaaagtgtccatcaacacctggtctttggcggttactttgcgtccgtcgccctcgtgaagtacccgcacctgcaaactggtgggcgctttgcccgcaccggcctccatttggggtgcttgtcctaactcgccagaaactgccgggaacttcccttttacttctggtgcggaggcatcggatcctccctgggaacagcccgaaaggacgcccaggcacagggcagccaagagcgagagcactatcgctcgcattttcaatgttttaactgcaggttgcaaatcgttataagtacgcataacccagcctgtacagattttctagagggtgccgataatatccatcacgaatgcgacggcttgcccgttttgcatggaacttaaagctagccgcgatcccacagttttaccagcaagctctttatctaatcccaactcggctagtgtcttttccccttgcagcggcatcggagttgcgctatcccaggtggaagcagtcttcccttcctggtctacccagctttgatgcactatcaccacatctttagctttcagcggcgctccttttccttgcgccagcactactaccttgcgctcttttgccaattgatctggggttaccttcaatgccggctttgcccctagtttgccgtcaacttccagaccgggcaaagtttcgccggtggctttagcttctgctagcagctgctggcctttcttcgcctgggatgcggagaagcacttcaaagtatccactacgaataccaaggtagatccggcgggaatgtcgccggttgcctgatccccataacccaattcgggaggaatcaccaggagggtgcgcgatcccggtttggcatctttaaggcctttaccccagccgggaactacctgctttaaagaaaaaacggcggggtttccacgatcaaaactggaatcaaattttttcccattccacagttgcccgtgatagttgaccgctaccaccgcgccggtgccacaggcttcgccctctccatctttgagagtaacgactttcagatctttcggtggggttcccttcccggcactaaccttgggagccttaccgtaatcaccctcgacatttaccccagtatcgttgctactacatccggtgagggcgccgccgattagggctcccataagagcgagggcagcaaaagaagatgaaagtctacgtttcacggttaaatcctgactgtttttagtggaatgactggccgcaggcgcaagaacctacagcattgggattatcgatggtgaatccttgccgctcgatagtatccgagaagtcaatagaagcgccctctaaataggggttcgacattttgtctactactacctctaccccgggagcgaactccacgaccgcgtcgccttcaagcagacgctcatcgaaatacagctgatagatgagcccggaacagccacccggctggactgcaattcgcagccgtaaatcatcgcgaccttcctgctctaacagcgattttactttttcagcggctgcatcggtcaaagtaactttgtgggtagctgttttttcagcctgttcttcgctcatgtttctccctataacaatcgtctggtttcagtaagctagtccttagcctagtccaagccggcccctactggctatcgtgaccaggtacgcgctaagcgaagtccggcctgactcataccggcgatatcggagggaaactgatagataccgtcaattcccatctcggctccctctgctctacttaggttattttcactggtaaccacgactatcgggattccgctgggagcggataagtggcagagatgttctaagggggaaccggaaagattccagggggaaagctcaggggtattcgccactagcaaatctgcgccccctaaaatctggggcagttgggtgcgctcatctaagaaatctgccgcgaaatctaggcgggctcccaatctgcctagtagttccccgatcccaaaagcgcatcctcctcctggcagcgtcccgatttggctttcctgagcttttccgaagccagttgcactggacagccccagataacgctggtgtccgaactttttagcctcgcccagtatgccctcccaattttccttggttttttgggcaatctccggccgggtttttgctaccgcagccagcaccccggaggcagaaaatagcggtttctgactgccggtaactaccaccgtatgggcgagggcgcgccccagtttttcccacacttgcggatttgaagtttcccgatcataggcgcgtgccactccccgcataaaggcggcaggaaaatctggtaactcctctaggttcgccaaagtcgctgctccgggtgacaaatattcgctttgcaaggatagtcccagatgacagggaggaaggtaaataccatttcccgctttcaataacgcggacaaccgttcgcctgccagttccggatcgatagtgccagcgaaaatatctgctaccggaaagttaactgcgacctccctaaatccataggagtaggggatgatctccagctgatcttggctttgatgaccctgccaaccagctttaaaggcctcccctagctctttggcgctagcggaggcagtgctggttaatgccagaactatttgcacttaaagctggccacctagccggctaaggaacagtgcctccgccgtaattgcgttctgtaagtcccctaaatcttgggattcgttttccgaatgggcgttggtggccggatcttctaccccggtaatcaagatatcggcctgggggaacacttgcgcgaggtcggcggtcatcgggattgctcccccacaaccaatatctaccgcgtctttgtcccaagcactagataacgcccatttcatatctttttctgcctcagatgcttgggcttgataggaggggccgcattcgaggacttcggtctctacctcggctccaaaaggtgcattttctttcaggaaatcgctcaatgcctgagcacattcggcggtgcaagtgcccggagcggttcgcagcgatagccgcaaacaggtttcgggcaccagggcgttggcgctttcggcacgggaacgctgatcccaaccgataacgcaaagtgatggctgattccagagccgcgacgccacgtcgcccttcccggctagtttaaagctgtccactacctgggcatctgccttaaataactcttctggataatgcacatctgcactggtagaaccgccaagaccaggtactgccaagctaccgtcagggttaaaacatttcgccactaaaaggctggcgatagtgaccgcatctagtaccgggccgccgtaggctcccgaatgcagggcggtttccatgactttgactttcacatccaggctggccactccgcgcaaagtagcggttagggctggttctcccacccgccagttatcggagtcgcaaacaataatcacatctgcagccaaatcttcccgatacttttcaataaagttacggaatgagggcgagccgacctcttcttcgccttcgataaagcaggtcacgttaaccgggcacttatctgccagcgccagcaacgccccgtagtgcaccatgactcctgccccgtcatcggaagtgccccgcccatagaggcgcccgtccttttcggtggcgacgaaaggatcggtgttccagcgttcgcgtggcccggcaggttgcacatcgtggtgggcatataacaaaactgttttggcctgtgggtcaactattttccgggcaacaactgcaggcattccctcttccccaccgggagtaggagcggtttttacctcggtttccatccctagattcgaaaatagttccgccaggtggtgggcagatttttcgacttcctcgcgggaggatgaagaaaccgacgggattgccaccagtttcgtcaattcgcttttcacgtcattaaaaatgttctctgaagctacttttactttggaaatatcactcatgattgccaggttaccccgatagcatgggctgagggaaagactgcgtttctatctcagttaagaaaccttagataatacagatttccaaagcccgctctggctagataacctggatgagtgaaactttttggacgcagtaaagatgacgacgccgctccggtagaggacaaggtctcgggcaaaggtcgccctacccctaaacgcaaggatgcccaggcgcgcaatcgccgaccactggtagtagacaaaaaagaggcacgcaaacggcgccgcgaacaacgcgacgaggtctacaagaaacagcgggaagcactagatggcaagggtgatgaacgctatctacccgtcaatgaccaaggtccgatccgtcgctatatccgtgatttcgtagatgctcgtttcgctatcggcgagttattcatgccgattgtgctggctttcttgattttgtcgatcatgttctctcgcaatcaacggttgaattcgtttttactattcactatgtgggggttgctgctgctggcgctaatcgaagccattatcaccaccatgatcattaaccgttcgctaatgaaggtagctgagggagataagcgggtaaagaaaggaaacggccgctatattttaatgcgtctagccagtccgcgccggatgcggcgtccccgcccttctggttcgcgcggcccacgccccgatattagcgaatacgccagggatattcgcgcctatatgcgttctcgcccctagtggctagttagtggttattgcgtagcggaagtgccggaagattggcactaagctgcttgtttatctttccggcgaaactgggaccctgatagataaccgcagtcagcgcctctaaaagatcggctcctgcctccaggaactggcgggcagaggctacatcctcgattcccccgcacccgatgattagatattcttcgtttaagtgggagcgcaagaggcggactacttgcagggcacgttcttttaagggaggacccgagagtccgccctccccaaaatcgtggtcaatggtggtgttagtggcgatcactcccgctaaacccacttctttaaccatctcggctagttccaccagttgcgaatcttccaggtcaggagccaatttcaccaacactggcactgccctaccggcactttcttgagctgcggttttaactgcttcggcgatttcgcgcagctgggcgctagcttgcaggctgcgcagcccgggggtattgggcgaagaaacgttaatcaccagatagtctgcatattttgccagcgccagcgcactggcgcgataatcgtctgctgccttcgacagatctgtcgtcttatttttccccaggttcacccccaaaactagggaacgcccctggcgggtgcttcgtaactgttgtaagcgccgcgccatctgcgcagctccctggttattgaaacccattcggttacgcaccgcgcgtagtggcaatatccgccaaaggcgcggcttttcatttcccggttgcggacgaggagttaccgtccccacctctacaaacgcaaacccgaaagcgccgaattgcagcggcgctaaggcatctttatccatgcccgctgccagtcctagatatccgggaactggcctggccagggattttaatccctgctgactgccaacccagccgctgttcaaggtagctactgaccccgaaaaaaacattctgattagcgcggttaatcccggaacccgcgaaatcagatgcagcgcattcatagttgcgttatggcatttttcgggatcaagccgtgaaatcacgtggttatataagaatcgatatagcacgggctcaattgtacttaatagcggacgcacttactgaatagctgggaaactgtatcccggcagccgacgttattgccggtttttattgctagtcccaccacaggcaccaaccggcagatgcccatttggggtcggcactatagagttcatcgggcgcacaggcttgccccaaggcgagtttgctctggtatgcgtgccaaatttcgcgggcgcgctgcgcagaaggctccggcacaccttcagcagaattttcaacgataaacatagtgtccacgctgacgcgctcgtcccaacgcgaagaaccgataaggtatcccgacaggtaaacccgccccggattggctatgcacgcatttaggaacgccaacaaagttggggcttcattttgccggtcggccagggctacccgaggaagcgctgccaacactttccgcgcaccctcggcatctaagccgtgaaaacgctggtaatccccgattccttgcccggtagcgacatagtttttaagaatttcggggattttggtttccgccagccaccccagtggtccgtaaaggccggaaggcagatccgggtcctcttccagcatctctagcagatttttatccccctcctcccccaagaattccggggttgaaagggcaaagagatcactgtcttgcagacgcgctcccaacttagattttgcaggtggacgcgcaggtattgaagtggtcgccatagttactccttaagcttggtttacttttcttcactttggcgcgcacccagcctcgggtgaaaagagcagataagaaaacctggaaaactatcggctatgaaatctgtggatatctttttgtcttcctggacgccataagatagatgagtgcttattccgcttaacgatttatctgatccgcgggtacgtgattttacccagttaaaggacgtgaacctgcgtaaaagttttgaggccgaacgcggtctctatttagcggaaagtttttcggtgattacccgcgccttggcggccggtcatcagccgcgctccattttgaccaaccggcattggctggagcgcctgcaagaaactttggggccgcgggctgcggatattcctattttcgtagctaaggaggagcagctgactcgccttaccgggttcagtatgcaccgaggtgctatcgccgcgatggaacgcccgcctctgccggaactgggcgaagtgcttgccgaggcgcgggcagtgctgatcttagaggatctggttgaccacaccaatgtgggtgccgccatccgctcggcagcggcgatgggctttgacgccattttgactagccctcattgcgctgatcctctctatcgccgcgcggttagagtgtcgatgggaaccgtgttttccttgccctggacccgaattgacacctggcccgatacttccgctttgaaaacccgaggatttatcgttgctggtttagcactaactgatcaggcagtttccctgccagatttttgcgcctgcctgcattcccaaggggagcggggacaacagccgaaagtagccttagtgctaggcaccgaagggccgggaatgactaagcaggcattggctggctgcgatcagctagttaaaatccccctcagccacggggttgattctttgaacgtcgccgctgccggcgcagttgcctgctacgcggttagccaagccctagggacaaatattcagactccctaaagcacgcgggcgtcctcgggagcaatacgcctacttaaatcgctgggaaaaatcaggcggggcgccagcgagatagactcgccgcgccccgccttaaaaaccaggtctacgttactcctgaccggccttagccgcatccgcagcctctttggcttccttttcgataaagtcagcctccgtaagaccctgatgggggttaaagtcgatttccgagtagttttcccctttttgatagggcggatccatacggcgcagcgccactaccgaacccaccaggccgccccaaatcaccaggatggcgaccagcatcatcaatatcgcttcaccagtcatagctagtcttcctccttgttccagtccacattttctaggtcgaacgagggtgaaatctcggcgctcttatgccacttcatacggggcattatcactgagaacaccaagagaatcgccaacataccccagccgaaagtatttgtccaccaacgcggataatcaccataaccgtgagaaatcagatccaccaggttaggtaccagcatgaatactaggagcaccgggattacgaagccgatgagcccctcccaccatttaccggcttttaccgcagaggtcacgttcaagtgaactcgcagggaacgtagcgagggggttaccactgtaacaatcacgcacagtgagagtgccgcacctaccaccccgatagtgttgatgtagttgtcaacggtgtcgagtgcggccagcccggtggtagttccaaagaagaacaccgagacgatcgccaacacgaccccgagaatcaccgatgcctgtttagaggtccaaccaatcttgtcttggaaagcccccgcaaccacctgcaccaaagacaccatggaggtgatacccgccaacactagggaggcgaagaatagcgctccgaaaatggcgccgccaggcatctcgttgataatttgcgggaaggtaataaaggaaagcgaaaccccggaaatattttccagtttgtcgaccgaagtatgttgcagatgcgccatataacccaaggtggcgaaaacgccgatgcctgcgagtatctcaaaggaagagttcgcgaaaccggcaactagaccggtaccggtcaagttagaacgcttcttcaggtaggaggcgtaggtcatcataatcccgaagcctactgacagtgagtagaagatttgagcaacggccgcaatccagactttcccgttccacagggcgctccaatcgggggtaaagaatttgtttaatccgtcggtggctcccggcaaggtcagcgccttgatcaccatggctacgaatagcactaccagcaagggaatacagattttggtaatccattcgataccgcgcgaaaccccgagagcgattaggacaatagtgaccacccaggtaataatcagcggaatcgcgattccccacaccggggtcagcgagattgaagtggtgtcttgtgcctgcaggaacttatcggaaaagaattttgccggatcatttccccaggcacgagtaaaggaaaacatggtatagcgcagcgcccaggcaataatggccgcatagtagacgacaatgaagaaacagacgcccacctgccaccaacctacggcttcggcacgccggtttaccctggcgagagcgagagggggcgagccccggaacttgtgaccgatcgcgtagtctagcatcagcattggtagtccaatggctagtagggcgatcagatagggaacgatgaacgcaccgccaccattggtataggcaacaccggggaaacgccaaatgtttcccaaaccaatcgcagacccaatcgccgcaatcaggaatccatattgtgtcccccatgactgtcggctggtcttatcggacgcagtaggctgcgaaacctgtccagacatctcaactccttatagacgggacaaacaattgtcgaagcgcaattgcttagagctaaaatagccccttctatcatttgtcggacaaaaacacccacattgtgagatttttgcctgaggaaactagctgaaaattagttttctcccgcttacgccgtaagtaagcgggagaaaactagggttttacgcagttactgcggcgtgacgccgcggggtttccccttcttcatcttcacccgattccgttttcttttcccaggtaggagcgcccgctcccagctgttctagactcacagctttggcggtacctgcactttggatagtcatcaccgcgctctcactagagtgagtgaccgtccccgaagttacggccacgcgggggtgggctttggctacgccctcactgttttgaacctcatcttgaggatccgcgccatcggaaccctgttcagaagcatcttttaccccagcctctttttgggggctgactacttcctgctttacttcagcggtcttctccggagcagatgccggttcctccgggctcttttccggctccgggatagctgtgtctttagctaaaagctgctctttcttagcatcattaggttttttgctctgggtttcctcgtcatgagccttactggcagctgccgcaacttttgccatcgacgcccggttcttagactccgtttttgaacgtctgtcttccctggcctcacgtttttgcccctgagaacgcagattttcatcgctattagcaccgttttctaccggttcgccatgcacgataaacccgcgcccctcgcaatgctcgcaaggagtagagaatgcttctaccagcccttcccctacccgtttacgggtcatctgtaccagaccaagggaagtaacttcggttacctggtggcgagtgcgatcccgccccaggcattccactaggcgtcgcaacaccagatcccggttggactccaacaccatatctacgaagtcgataactatgattcccccgatatcgcgaaggcgcagctgacgcacaatttcctcggcggattctaagttattgcgagtgacggtttcttctaaagttccgccggagcccgtgtatttaccggtgttcacatcgataacggtcatagcttcggtacgatcgataatcaggtagccgcccgatggcaaccaaactttgcgatccatccccttagctagctgctcatctacgcggtgggcagcgaaaatatcatcggcacccacccattgttcaacccgatcacgcagatcaggagcaaactcttctacataggaatcgacttgacgataagtctccttaccttccactttcagcttttggaaatcttcattgaaaacgtcacgtaccacccgcaaggctagttccggctctccgtgcaataaatagggagcagatttggaggacgcggcgttcttttcgattttctcccactgtctttgcagacgctgcacgtcttgacgaagttgatcttcgctggcgccctccgcagccgtcctaatgattaccccgaagtccttgggcacaatcacctttagcagcttcttgaggcggcggcgctcactctcgggaagtttccgggaaataccggtcatagttcctcccggaactaaaaccaggaaacgtcccggcagcgtcacctgcgaagttagtcgcgcacccttatgtccaatgggatctttggttacctgcacggtaatggaatcgccagattttaaggcttcttcgatgcgccgcggcctgcccttcatcccggcaacatcccaattgacttcgccggcataaagcaccgcgttgcgtccgcgccctaaatcaacgaaagccgcctccatagagggcaaaacgttttgcactttgccgcgataaaccgaacccaccatagtggtttgggtatgccgggaaacatagtgttctaccagcacgttatcctctaagactgcaatctgatttagtccgtctttagaacggattagcatagtgcgatctaccgcttcacgacgcgccaaatattcagattcagtaatgatcttggggcgtcgtccctcccggcgtccctcccggcgacgctgcttcttggcctctaggcgagttgaccccttgacctgctcaatctggtcaacagcctctgcgctaccgcgagtgcgccgccgacgcctacggtgactactacccgtttctgtttcttcttgggatccccgcgctgcttgagcgccgttagtctctgacttatctttccgggcagtagtctctttggaacgagattgtttcccgttgtcaccggaaccattatccccggacgcgtcctcgcctttacgggagtttttagagccccgcgcctttttctcgcctttgcctttagtcgatttagttttcttttcgctggcgccctcaccctttttccggctcttgcgcctgggagccgagtcctggtcgctgtcgccatccccttgagcgttcacttccggaacgggagccgccgcaaacataggagccgcaaaagctggagccgccgtaatctgagcgggagctgccggagaagattctattttcttgggggcagaaaaagctggcccggaaaaaagtgccgcgccactattttgattagattctgtttcgttattatttgggtctttcaccactgatctcacctggacacgcccgcactggcgagtcccctatattacgccgtcctctaggacggaagcctttgtttacgcgagtacattcaccccacgccagagagttttcctaggaaaatagtccctctggggtggttccctccgtagtgcgacgccggaaaccatccaagatcattattccatatttctcaattctgtcgtaaaaccaggctaattcttagaaaatcctgggaattacttagcgaccggctgaaaaacgagctaatctaagtgacaacgttgtcactatggactcgcctaagcaagctcatagcgggcagcgacttctaaaccgactagaaacggaaaggcgagcagaatgactattgcttcaacagcattagatgccactatgttggcgcgatggcagttcggtgttactaccgtctaccatttcatcctggttccgttcaccatcggcatgtccctcctggttgccattatgcaaactaaatggcataaaactggcgaggaatattggctgaaggcgacacggttctttgggaaactgttcctaattaactttgcactcggtgttgccaccggtatcgtgcaagaattccagttcggcatgaactggtcagagtactcccgctttgtgggcgacatcttcggtgcgccgctagcatgtgaggctcttatttcattctttatggagtccaccttcctgggtctgtggatcttcggctggggccggctatctaagaaggcgcacctcacgtgcgtctggctggtctgcgtcggggttaacacttcggctctgtggatcgtgggggcaaactcctggatgcagcatccggtaggggcaaccttcgatccggcaaccggccgtgcacagttggacggcctggctggcttcttccaggtactgcttaacccggtactgtgggcggcatacactcacgtgctttctacttcatggctgctggttggcacctttgttgccggcatcgctatttggtggatggttcggtctgccaacgctggcgccgagactgaggcacgtgacatttggcgtcccattgcccgtttcggcatggtggtagttatcgttggcggtctgctaaccgcggtcaccggacacgttcaaggtcagctagttgctaagcaccagccggccaagatggctgctgctgaggctctttgccagactccaaatgctggcgagggcgcaccctttactattgctgcttttggaccactgaacgctaactgcgatcagatttccaaggttggcgaggtacccggggtttactccttcatggctaccaactccttcactggaaaggtagagggtctggatactttgaaccagcaatatggctcattgttctctgagattctcagccagcgcggctacgatatgcagtcgcagccggttgacttcagcccgaacattatgttcagcttctggagcttccgcctgatgatgctgtttggcatcttctcggcaatcctggcgatttggggtctggttgctaccaagggtggcaagatttctaagtccactggtttgggtaagttcgccatttggtccctgccgatgcctttcctagcctgctccttcggctggctattcaccgaatggggtcgtcagccgttcatcgtgcacccagtggacatgcaagtcgatggatcctcggtatttatgcttaccgcccatgggctttcgttcgcagtgcccgcatggcaggtacttgttaccttgctgggcttcacgctgatctacctggcactaggcattgtctggttcctgttgattaagcgttacgttaaggaaggtatccacgtcaatgccaatgaaaaggcagtacatggcgaggatgctggcaagaacctaagctttgcttactaggtcagataggagatcgaagagatgactattctacaagttatttggttcatcctgatcgccgtcctctggactggctatctggtactggaagggttcggtgtaggcgccggtatggtaatgccgatggtagccaagaccgaccgtgaacgctctcaggttcaaaagacctttggcccggtttgggatggtaacgaggtttggttgctgaccgccggaggcgcgactttcgccgccttcccggaatggtacgccaccatgttctctggaatgtacctggcactgttcctgattctgttctgcttgattatccgcatctgcgcgattgagtggcgcaccaaggtagcctcggctgcttggcggggtcgctgggacagctggcagaccattgttgcctggctagttccgattctgttcggggtggccttcgccaacctggttcagggcatgaatattgcgattacccagtacaacacccccggtgaagccgtggcgggagctgctgacctcagcaagcacgtccacaacttcacttctcagggcgctcctctcggtagcgtattcctctcgctgctaaccccctacaccattgcgggtggggtcatgctagcgttgattttcgctactcagggcttggcttacttggctctgcgcaccaatggtgaagttcagaaccgcgctaagaatctgctcggtaagttcgcgattgcggacaccgtgctggttgcagtggccgcgctttggggtcaattcctgtacgcttcccaggccatggcttggattccgctgatcattgctgccttggcgtttgtcgtcacggtactaatggcgcttcgcggctccgaatggggtaccttgctcgcccactccgtcggaatcgctggggcagttgcgtggatctttaccgcgatggcacccaacgctatgaagtcttccattaagccagagttctctctgactatctgggatgcttcttcctcgtcgtctactttggcgattatgctagtgatcgcgctggtagtggtgcccattgttttgggttacaccttctggagctacactcgcatgccgctgaagattactcttgagggtctggacgaaaacccgggtgttccctgggacaagattcgtcagggtgcttctttcctcgcggaaagctaggcaaatatcggcacctatcaggtaacttccaactaggtgccagtaataaaactaaataaatagtgttggccttggctattcagccaaggccaacattatttttacccccacgactattgtccccacctaccggaaacagattttactgacacgcgaaacccagaatgagcgcgggaggggatttcatccgagtgggcgcggtgttaccgaactggggtagaaaaagatgcgagagggggcttgagccgagcgaagcaaggctcaccggggtcccccgagtactttttctaccccagttcctcccacgtactatcagactagattgggacgcgtttagagttttcacgttcctgtgggaaaatagtcccgatatttgcacggaggacacttgttttgaaaccacttgatccgaaactgctgaaatatgctaagtctgcgcgggtcgccatcgctatcaccgcagtcaccggcattatgcaagcaggtctcgtaatcgcccaatgcttcttaatctcggcactgatttctccagtaatctctttaaggcaatcctgggatcaagtcgctcagttcgcgttttggctggcgcttgtatcgctggcacgggtagcactcacctatttccgctccaaccatcaacatagggcggccaagaaagcgattcgggaactgcgtggacaggtgctggcgcattgtttgaaactggggccgcgctggctggcacgcaaaggaaccgacacggttaccctggctacccgaggtttagaaaaactcggtccttatttcgtggactatattccgcaactgatcttggcagtcacggtcactcccctagtgctactggtaatggcgattttggacttttggtcagcgctggtagccattattactattcctttgatcccgatatttatggtgattattgggctgatgacccagactgcctcggatcgccgcctggctaccatgcagcatttgggcaggcaactgctagatttagttgccggtttagcgactttaaagagcctgggcaggcaccgcggcccagaaaaacagatttcttcgattgggaaaacctatacccaaaccacgatggcgactttacggatcgccttcctatcgggtgcagtcctggagtttatatcgattctgtcggtagctatcgtggcggttaccgtaggtctgcggatggtggctggcggtctcgacctctacactgggctaattgcaattatgctggctcccgaggtatacgcgccggtgcgggaagttggcaaattcttccatgcctccgccgatgggctttcggcttcacaatcggccttcgaaatcctagaaactcccccggctaccagtggtgataaaccggctccgaaactggaagaaaccactattacgattaaggatctggggatgcgttcgcggggagcttgggcacccaatgccgttaatctagtaattaaaccggccactatcaccgctttagtaggtaaatcgggggaaggtaaaaccactaccgttatggcgctgttaaaacagctctctagcgaccgcggcactattaccttgaccgacgcctccggtaaaaacctggatttagatgaggtttctccagattcttggtgggagcaaacctcgtggctcccacagatgccgctattgctaccgggaactttggcacaaaacattgctgaaagccccgctcatcttgcggaacttttccctcagggggcgcccggggagcaagtgcataaagccgcgcgtctagcgggtttcgaggaggtagtagcgaagctaccggaaggctggaacacatttttacgggcaggcggggaaggtctgtcagtaggtcagcgccaacgccttgccctagtacgggcgctgctctctaccaagcagctaattgctctggatgagccttctgcccaccttgatgcccatttggtggcacaagtagcacaagtggttcagcagttgaaagatgcgggaaaaaccgtagttttaattgcccaccgtaaagagttagcacagatagctgaccaggtagtgcgaatttcttctgttcctttcactcccgaagaaacagaaaagtatagagatactcagccacaggcggccagagccagtgaggcggagattcctgaattcttaggctcgacccgggggttggaatagcatgaaaacttggttcattactgctgaggaacgccaggctctcaagcgggcgataaaacttttggaactaaaacccggcactttgttcttggcttgtttcttgggagctgccggactgggcgcctccattgccctgggtgccaccgccgcctggctgattgcgcgtgcctcccaaatgccacccgtcctctacctggaggtcgcggtagtttccgtgcgcttattcggaatctccaaagcggtgttccgttacctagagcgcctagcctcccaccagctaggggtatcggggatgaccaccctgcgcactaacctttataagacgctttcgcattcggatactgctcggatcgccagtttgcggcggggagatattctcgaccggctgggaaccgatgttgataatatcggtgatttcgtggtcaaaagcctgctaccagcgatggtggccaccatcgtgggaatcatcaccgtaatcgggatttccctagtggattggcgcgccgggctgttcttaactttgggcttgctgctctcgggagtggtagggcctttatttaccattcgttctacccggattgcccagcgccgggaaaccgaaagccgcgcccacatttcagaagtagctatgaccattgttgatggatctgctcaaatcacggttgatgggcaaacccagcaggtgcttgccggcttgtccgatctggaagatcagctctatgacgccaaggatgccaccgcgaaaccggcggcttgggcggcggctatcgacgtgttcggaatgctgatgtcagtgataatggccgcttacttcgggatttttgcggttattgatcagtccattccggaagtcatgttggccgtcctggcgcttacacctctggcttcttttgaggggactgcccagctcggtcctgccgcccaacagctggtgatttcagcgacttcggcggtaaggatcatgaatatgttgcccccggaagaccaggtaaaagcggctgaagaaaccgaagatgcggtgattgaaaatttcaaagctaccggcccgagcatcctcgaggccaaggatttagctatcggctggccgggcggcccagtagtggctgacgggattaacctgcggctggctcccggggatcacctggcgattgtcggccagtccggcattggaaaaactaccctgctctacactctatctggcctgctaaaaccagtttctgggagcgtaaagattgacggagtagatatttcctctctgccacgcacgcaggcggctgctagttttgtgatcactcccgaggacgctcatattttcgaaaccactattctagaaaacttgcgagtggctaatggtcagctttcagtttctgaaggcgaagaactcgttaaagaagccggtttaggcgagtggctttcctcgctaccggacggtatcgaaaccgagttaggttcgggagcgaccactatttctggtggggaacgccgccgcatcctgctggcacgcgccttggcagctaaagctccactcctagccctggatgaaccgggtgagcacttagatccggaaactgcggatgcgctgctgcgagatttgctaactgccggcagcaaggaacatcagcggggagtcgtgctggtaacccaccgcctcaccccacttgaccaggcagatcgagttttcattatggataaaccgcatggcctgccggatgaaccggcaactttcgtagcccaaggtacccatcgagaactgttggaaactcaccaaggctatgcctggagtctgcgtcaggagcaggttgatgtcttttaaggacctgcccacctccgataactctgatgcggatgcgtcctccccgatcgatattcctccgctgctaaataatgcttcggggcaatactcgcccctaccagaagatagcacccagttactttcctcagtgctgcagatgatgggaaacctggagcaagataaagttctgcaggctttcgtagatcaggcttgtgcggttacttcctcgccctatggggcgctatcgattctgggttcgcgcggagaaaccagcgctttttatatccacgggcttagcgccgacgagagagaaactttaggtaatccccccatcggtcggggaataatcggggctatcccggtagataacggcattatctctaatgatttgcattctgaccctcgtttcaccggttacccgcctgcgcacccagaaatggtttctttcttgggggtgccgcttcgtatccacgaacaagtctatggacgcctctatttgtgtaatcgtcccggcggttacagccaacaagacttagcttatgtgtctggtttagcgatcctggctgcagtagcagtagagaactcgcgtctttatgaggtttctcgttcccgcgagcgctggaccagggtgtcgcagcagctcaccacgattttattagagggaaccgaagaagaggacgcgctacagttcatcgccaaatcagtgcgagaggtagcggacgcggatacggcgctcctggtgctaccttcagttggcgattcctgggtatgcgaaattgcttctggatacggcgccgccgaccttatcggggtaacctttcctccccacggacgggcgcggacggtactagcggaaggtcaaggtttaatcgttgactctctagcccgagcaaccactatgcgggtacctgagttagctaagtttggggcggcgctttatgctcctctcctggcaggttcccacgccatcggggttttattgctgctacgtctgccggaaaaaccggagtttgatccggcggtattagaaatggcggaacaggtcgctactcaggcggctttggctctagagattgcaggggctaaacatgcagctgatattgctactttgctagatgaacgcgccaagattggcgaagatcttcatgacctggcgattcagcaactgtttgccaccggcatgcaattggaacgtatccgcgcggcctttgctaatggagatgatctggactctgcacgcgccgaatctttgatgcaagatgctcttgctagcgtcgatgattcggtgaaacagatccgggcaattgttcataacctgcgggaacctgacgcggcagtcgatttggttgaacgcttgcgccgggaagcctcactggcgcgtcgcctactgggttttgcgccctctttcgttttagatatcgatggtgagacactttcctcggctaatccctcgcgggaagaaatcctgattgaggaggttgatcagcggcttagccacgatatttctgatgatgtggtggcggtggtacgcgaagctttatctaatactgcgcgccacgcgggcgcgtcttcggcgcaagtagtggtgagcattagcggtatgggcactaatggttctattcgcgtcgaagtaaccgatgatggacgcggcctcgaccctgccgttaccaggcgttccgggttagataacctaaaaagcagggcgcgccgccacggcggaatctgtctggtgcagcccgccttaccgcgcggattgaaaattatttgggaagttcccctttcttagcgaacttccccgcctgctacctagagccctgccgatttggcgacctcggctagcttttcggcactgcgagtgagggcatcacgctcattgagggtaatcgggggatcaagtacccgccctatcccggctcgtcccaccaaggtaggagctgccatacatactccagaaatcccattccagttatctagcagcgaagataccgtcaacacccgatcttcatcgcgcatcactgcagaaataatattggtgaccgacagaccgatcgcgaagttagtgacccctttgccttcaattatccggtaagcggattcgactacatctttggagatgcgctgtttcagcttgtcatcaaagattccgccattaatcgtggctccccagcgcgaaagcggcacgttaccgatctcggcgcttgaccacagaggtacttccgagtcgccgtgttccccggctatataggcgtgcacgttttggactgccaccccggtttcttgggagataaggtagcgcatccgggaagtatccagtaccgtaccggaaccaaataccttatgggagggtagtccactcatcttcaaagccatataggtggcgatatcaaccgggttagacaccaaaatatagatagcgtcgggggctacattcagtaccttcggcaaaatcgagttcatgatatttaccatcgcctgcaccatatcgaggcgcgactgccccggtttttgctgggggccagcggtaatcacgactacatccgagtcccgcagtacttctacatcatccgatccggagatcgaggctgcgggggtgaactgaatcccgtgagccaggtcgagcgcctcggcctctactttggctttattgatatcaaagagggcgatttcgcgtgccgcacctttgatttggcaggcataggccagggcggttcccacgaatccggcacctacaatcccaacttttgagcgccgcgtaagcatcgacgcggggtagagagaattagcgcgttctttggacattttttctcctttagactgggattaatctcctacttattaagttaccggctgctaccaggattttccggtgatgaacggcctaattgctgaggtgattttggatgcttttcagcttgccggttagctagttttctgtttcctcgaggttccccagccgccctagtgcccctagcaccgtctgatagtcggtagttcgccaaaatgggggcagagattttagcaggtagttggcgtatcgggcgctaactagacgctgatctagcaccgccactactcctctgtcgctgtgggtacgaatcaaccggccggctccctgcgccaatagtaaggccgcgtgagacagggaaacctcggcaaatccgctacgtccttgcgcctcagccgcccgggtacgcgcggaaatatagggatcattgggtcgagggaagggtatgcgatcaattaggacgaggcggcatttatcgccaggtaaatccaccccctgccaaagggaaagagtgccgaagaggcaggaatttttactggctgcaaagtcctctatcagttgatttatcggcgcttccccctgtaggaacacctgcaagtcactttcgtctgcaaaatactcggcggcttgctgggcggctcgataggaagaaaatagccctaaaaccccaccaccggcagcttctgccagctctagggttctttccaaggcggcttcactcaagccagatttacctggccttggtaaatcggcggccacatataaaatcccctgctggagatagttaaagggactgccgaggtcgctaccttgccaactttgtttgtcccggaaacctaatcgattcgcaatcgcctcgaaagatccccctagctgcatagttgccgaggtgagtacgcaggaatgtcccttaaagagatgggcataaagatccccacctacatccagggggccgcaatagaggcggcggctcccggatttttcttccgcgatccaggcggccgatttttccgggtcaaaggcagcgataatctcgcaagaatctagcgcctcttcaatctgggcgaggacgatgcgctgctttacccgttgttcgtcctcatccccgctgctggtgacttccccagagatatcggagagttctatttgcagagtggtcaaggtagtttctagtttcttcggcagttcgttaagttcgccctcgtcttgttcttctaggatttttgtgaaatttttggccgtcttttccagggcggtaactggcaggttgaaatgtttgctcaccccgcgcgctactttttctatggcgccgccagagaggtttacgcaggcttgggagcgggcgcgggagggtagttcgtgggcttcatctacgatcaagaggtcgaactctggcagtagctccgcgctggtgagcgcctctatggacagcaaagcatggttggtgatgatgatatcggcgtcttgtgccttcaggcgcgcatctcggggaaaacaatccgtaaagaaacgacaggttttcccctggcattggttgggagaaatcgaggcttgctgccaggcggctagggtcactccgcgctgaagttcatcccggtcaccgctgtcagtttcttctgcccagtctcgtaggcgctgcagctgtttaccgatattactgggggaatattcggtggcctcgtagctggggaacagcccttctatttcttcgggagccgccaatttccagcggcaaacatagtttgaccagccttttaataccgcaactgtgggaggcgtatagccgagttcgcggcaggcactcactaccgtgggaatgtcgcaggtaagcaactggcgttgcaaggctagggtcgcagtggagattacgactctatccccgtgttcgattgcccgttggaaggctgctgccaggtaggcgagagattttccggtaccggttcccgccccgaccaattggcttccgggctgggaaaacgagcgggccaccaggttacacatttgcacctgttcggcgcgttcactgccgccaatctggttaatgcaggtactgagaattttccgcgccgcctgggcatctttgctgctcccacctctacctttatcggtggcccctaccagtggggatactccgggatcaggcatctaatttgccgcctctaggatggcttgggcgagggcggggccggcgcgtcctacgacgtgagtaccgttttctaagtattccactttgtctacggtaccttcctcgtgtagccgcgctaccagcccagattggtcgtagggaatcacgtagtcaatgggtttagcgggaggaggtagcgcctgaccaatcgcctcccgcagttggtctagcccctgcctggtgtgggtggagaccgggattcctccaccgatggcagattgcagggcccgaatgtgcaacgcatccaccaggtctgttttattgaggacgagaatctcgggaatgcgggaaacattaggcagatctgctagcacttcatgtacggtttctacctgctggacggggttgtggtgagtagcatcaaccacgtgcacgattacatcggcgtattcggcttcttccagggtggagcggaaggcttccaccagttcgtggggcagttcgtcaataaagcctacggtgtcggacaacgtgtagacgcgtccatcgggggtctccgcttgccgtaccgtgggatccaaagtagcaaatagcgcatcttgcaccatcacatctgcatctaccagcgcatttagtagggaggattttccggcgttggtgtatcccacgattactaccgagggcagggggctgctgaggcgaccttcccgtttggtgtcccgggcttttttcatctgtttgatttcgtggcgcagtttcgcgattcgtttggtaatccgccgccggtcggtttccagtttggtttcgcccggcccgcgcgaaccgattcccgcacctcccgatacacgcccgccggcctgacgcgacattgactgcccccagcctcttaggcgaggaagtaaatattgcagctgcgctagttcgacttgggccttaccttcgcgagaggaggcatgctgagcgaaaatatcgaggattacggcggtgcggtcaatgactttcactttgacttggtcttcaagtccccgccgctgtgaaggctgcagctgcgcatttacaatcacagtatcggcttccagggccgccacctgctcggctaactgtttagctttcccgcgtcctacaaaagttgcggcatcgggggcgctgcgtcgctgcaaagccgcgcctaccagctcggccccggcagtttgggctagcgccgctagttccgatagggactgctgggcgccggtgcgatcgcgatcatagatgcctactaggaaaactttttccagctgtactcgccggtactcgacctcggaaatatctagatcagaggcgtttgtgcgttggaattcttcgcgcagctgccgggagaaatccccgccgtgggagctttgtttcgtaagggcggtactgccccaatccagcagttctaacccttctttgggggtgtttgcgtctacatagtaaggatgcggggaagttgcgggggcgctgtcgaaggcggaatcagtttcgcgccggtttaagctccggtcacgcacgcggcgcaccagattataggctctgtccaggtcttgtttactgacttccgtttccgcaggtatttgcgccgcctcccttggtgctatcaacttaatctattttcccacgaccctgcgttagctgcaaaaggcgcgcgggaggtgtggcgtacgggatctttcgagggatcgggctgaccaagttcgacacatctcacagcccgggaagtttgtttcttccgcacgattgggtattctttaacaggtctagggcctatagctcagttggttagagcgtcacgtttacaccgtggatgtcgggggttcgagtccctctgggcccaccggcgtaatccggtcagggattactaacacaatagaactccagcattttgaaaatccgagaaaccacaattattccgtctgtacccccattaggatactagccagatattattaggggagcagaagaaaggaatgcgtagcgccccgccctatcggtttatgctgacttctttagaggaatagtaatgcgtgtagatatagatgacctcagatttaaatatcatggtaggggtgaaacgcgtaaaatttttgacggagcttctgtcagcttttcatcgggtaacttttatgcgctaatggggccgtcaggttcaggaaagactacgctgttcagactgctaactaaggagctagaaccggaaggcgggcagattctgattgggaatagggatttagaaaaaatttctgcccgcgaactccggacttcaattcttggtcgaatttttcaagactacctgttaattcctttcctaaatccgattgaaaatttgctgctggcgcgagagatcagccacggatccgcaggtaggcgcgaacgcgatcttgccttgcagttgctggcacgggttggattagcaggtcatagcactcaacctgttgagttgctatccggtggagaacaacaacgcgtagctattgcgcgcgccttgatgggatcggctcggattcttcttgcagatgaacccactggcgctttggatcgggataacactgttcaaatcgcacagttgctagctagttttgctcacgacgaggacatgctggttattgcgggtacacatgatatggaattcgctagttacgctgacaaagttattcatatcggcaattatggttttgctgtggagtaacgctaatgggtagacagcggctacgtctcatcttcaagatggctatacaccgacctgcggacgctttgggtacggtggttttcgcgctagtgttagtgatgacgtgcgcaagtcttagtggctttatttctgcctatagtcacgcaattcagcgcggagcgcaaagtagtttcggagcttatagtcaacaggtaaacggcaacgaggacgttgccgtttttatgcggtctttacaagataaaggcgaggcagtagctacttcatattcacgtcagaatcttctaaaaactgatacgaaaaaggctacgagtgcggacgtaacgatgcttagcggcgcgggcgacctgggggtactagttgctggacactatccagataaaccgggcgagctatcggttagccgggaggttgctaagagattacaggcaaagcccggggatcacgttgaactcgtagacgtagagcaaacgggaaagcaagccgcatttactctagttggaatcaccgaaaaccctgcttcgattcatgaagtcagcgccgttgctatcagtagtaatcaaaccatatttgattcctccgaagtatggttcacaaataatgatttgaccgctttgagtaacttgttggatcacggtggcggaaatgtcgcgacagtaacctcggtaatagagcgcgctaatgctaatgcggtcagttatcaggcgatatcgccacaggttgcttcactgtttctaggtctgattatcgtggtgctcttggtggcaatttatgctgtcgatcggcagcgacgccgcagcgtattccaggtattgaccgcgttaggtgatacgccagggcgagctgctttgaccacttgtacccaaaccactttgctggcattagttgggggagcaattggttggatattagcgtgtatatcgcttcccaccgtctcgcggtggctagcagcgttttttgagcagcgttggaatcaggtggaatggactgccgtgagcatcgctgcgctagcaacgctggtcatgattacccttggaggaatactgagtgcaggggtaacagttttatctctaaaacaccacaagcgcgctcacagcgagggactttcaccccgggtactgctgatagtaggtattgcgggcactgtagcaacattactcctgatagtttctcgacaaatattgatttttccgctgggtcaccgcgtagcgatgattgtcggagctctaagtatccccaccctggcatacgcactcacattattcacgcgcaagcgtaaagtgacagctcgtttaggcaatcgcttacaacaacttactttaggagcgcttgcaatagtattcgctttgaactattacggagcgctctatgcaagtggagtagcagattggactaattggctaggtcggcagattaatggtgaggaaagctatctgcaggtcacaagtgctaccgaacaggccgtagacaatcttttggaaagattaccccagttaaaaccgcgcaccgcggtatttggtgatgtctctaccaatgagcaaatgttccggattaccgatagcaaaggtactcaatgctttaaaaccgctaagtctgtagacgactgtcctcaatctaacctggattttgtttatgttgcctctggaggattgattgataagagttttattaaccatgctcccaaaagttatgtaaccaataaaggtgcagttactttgattggcatcggtatcactgactcgaccatcaccaaaatgtctacggtagagggacttatcggtgatcgtaacttggaaaataacattctaagcgggttggttatatcacctgactccccactgcttaaacagttaggggtcaagaaacctcagtcttacactgcgattatcaccggttttgccgccttacccgatgaggtgcaagacgagatacgtgcaaacctgctcatacaggctcccttcgcaaccataactgattctgaagatccgcaggttaggcaaatgcgtgcgcaagcggtagctcgccaacttttagcggtaatcgtctccggcgcgatactactaaccctagcggccgctttggtctctaatcagcaaattgaacggcgtctaatcgaactcactggcggcggtagcaagatgcaagtccgactagttaaatcactacttatctcctacacggtttcagtgacttgcgcagtaattttagggcgtctagccgcgatggatcgagtcccctttatccgcctgaattcagccgtttcccatgactacggtctggtgtggacaataggattgtctggcctactgttcctaatccccgccctcattatcgcaattcggtctagcaatactatcccgctaaccggttcgcccaaatctcaaaataatccttagccgaacggtgcgataaccgttttacctatccccaatcaccgctataccagagggattgaatgagggggacaaaattgtgtgcaatcttgccaaggggattactatcactttatgtattacaggcggataccgttattttcttcgctgacgcttaccgggttgatcggcgggttatggtggtatgccttggagtccaccgcttccacccccacttgggtgccggctagcgtgctagttatcgcattcctgattgcaactatcgggatggcctgtgcgagcaaaactaccggttccaagggcgcaaaaattacttacctgaccggcacgatgctgttccttgcgggattcgcgtccttttatgtattctcccaacctaccactataaacatttttgggtttatagcggttgctgcgggtttaatagccgcaaatctagccgcgggttacctttaccgggacaattctcggcaaaagtaaatatttcgctgcttagcgaccgcgggttactacttgggttcccgaccattggggggaaaccacatcagaggtggtgggattcatcccgactgtttttgcggcctcttcgattatgcggggatcaacggcacccgggtcagaggcaatcgggctgagcacccaaataaagcccccttcatccatattgcccatcgcatccatgagcgcatctgagagttcatcggcgccgccgtcatcatcgcgccaccaaatcagggcgccatcggtcatcgcggtgaaatcttcatctgctagatcgtcatcaatttgatccattatggcttggcgaagatcttcgtcgacgtcctcgtcccaaccaaattcttgaatgacttgttctttcttaaaccccatctccgaaacggatagggaactttcatgcctttcgcgtgtggtttccacgttctctaagttacatgattaaagcaataggaggaaacgcgggagcgagctttgagataatcgcctccggtttttcctattttcttctgtttcctggattgttcttgacgccctctccccctgtttctcctggtagaaagaatacgagccgggtttacgggaggcggaaatatgttaatgattttcttgccgctctgctggtttctggagagcgttagcggttttcgtttaggcgcactagccaaagcggcggaaatagataacaattaggtttgtatggtcatttctgttggaggagcaacgaaatctatgagtgaaaataaggcgtcactggattctgtacaccagttagctactgccctgccggatcccgatcctcaagaaacccgtgagtggctggattctttggatgatttgattcaagagcgcggtccggaacgtactcgtgatcttttgttgcggatgttgtcggcggcgggcgagcaaaacgtggcggtgcctgccaacctcaacaccccctttactaacacgattaagccgcatgatgaaccggcctttcctggcgatgaacgtattgaacgtgactatcgtcgctggatgcgctggaatgcggcggtgcaagttacccgcgcgcagcgcgacggagtccacgtagggggtcatatttcttcctatgcctcgatttctactctttacgaggtgggctttaaccatttcttccgaggtaagtcgcacccgggcggcggggatcacgtgtttttccaaggccacgcctcccccggtgtttatgcgcgcgcctttttggaggggcgactctctgaggaagatatggacggtttccgtcaggaactatcgcaggcaccgcatggcctgccctcttacccacacccgcggcatctgccggagttttgggaataccccacggtttctatgggactggggccggccgaggcaattacgcaagcctggttcgatacctacttaactaatcgcggaatcaaagactgctctgaccagcacacttgggcgttcctgggtgacggcgagatggatgaaccggaatcgcggggaatgctgcaactggcgggacaacaaaagctcgacaacctcacttttgtggtgaactgtaacctgcagcgcctggatggcccggtgcgcggtaacggacagattattcaagaactcgagtccttcttccgaggcgccgggtggaacgttatcaaggtgatttggggtcgcggctgggatcggttgctggccaaggatcacgatcatgcgctgctgaaagtgatgacggaatgtctggatggcgattaccagactttcaaagctaatgatggcgcttacgtgcgcaaacacttctttggacgggatcctcgcaccgcgaaaatggtggaggactggaccgatgaggagatttgggatttgcggcgcggcggtcacgattaccgcaaggtttacgccgcctatcacgcggcgatggcgcacaagggacagccgaccgttattttggcacacaccattaagggatatgtactgggtgagactttcgcgggtcgtaactccactcaccagatgaagaagctgacccttaaagatttgaaggcgctgcgcgaccggctgcatatcccgattaccgatgaggagctggagaaagatccgcagcttcctccctattaccgcccctcccaggatgatccttccctgcaatatatgtttgagcggcgcgagaagttgggaggattcctgccttcgcgtcctaaggaacgcaatcagatgcagctttccctgccggaggattccgtgtatgacgtcctcaagggcggttctggcaagcagaaggttgctaccacgatggcgctggtgcgcctgatgaaagagttcttgaaagacgaagagtttggcaaacggattgtgccgatcgtgccggatgaggcgcgtactttcgggatggactcgatgttcccctcggcgaagatctataacaccctgggcatgaattacacggcagtcgacgaaaatttgatgctgcattatgccgaaggtaaagacgggcagattatgcacccggggattaacgaagcgggagcggcggctgccttccaggtagcgggcacttcctatatgtctaatggggaaccgatgatccccttctacttgttctattcgatgtttggtttccagaggacgggcgaccagttctgggcggccggcgatcagctggcgcgaggcttcgtgattgggggaaccgcggggcgtactactttgaccggtgaaggtctgcagcacgccgatggccactccccgattattgccgccactaacccggcgtttgtgcagtacgacccggcctatgcctacgagctgcggcatattattcgcgatggaatgcagcggatgtatggggatggctccgatgggcgcgaccagaacgtcatgtactatttgacggtttataacgaggcgattcaccagccggcagaacccgagggggtagatgttgagggaatcttgcgcggtatgtatgccttgaccggtcactatgaaaatggcggaccgaaggtggagctgctggcctcgggagtctcggttccttgggcgctgcaggcacaaaaacttttgatgcaggattggggggttgatgccgcggtctggtcggttaccagctggcatgagctgcgccgggacggtatggattgcgatcgccataacctgattcatgcggatgaggaataccgcctgccgtatgttactaagcgtctgcttaatacgaacgcgccggtgattgcgacttctgattatgaccatctgattccggatatgattcgcccctgggtgccgggacgctataaggtgctcggcgcctctgatttcggttattccgacacccgggctgccgcgcgccgtcacttcttgattgatgcggagtccctggtggttcaagccttggaggctttgaatgaggacgggattctgcaggatcgctcggtggttaccgaagcggtaaaacgctatgacctgctaaatccgaacgctggttcttctggcgaacagtaatagctgacgctaatagcatcagggggcgctcatcgtttgatgggcggcgccccctattttttggagttaataccctgctaattccggtataggtattcacctgtctaaaaggcactggaccacattaagccacttttgcgattctgcggacaaccccggctttcgtgggatttccctataattgccgccgctacagttagcgataaatttctttgcgatgcccaatagctaaggcttgaatatagaagtggtcatcttcgatctcgcagatgaggcgatagtttccgatgcggtaccgccactgcccggcatagtttccgcgcagcggtttaccgtggctgcggggatcaggggtttccaccagatttttatcaatccagttactaatcattcgctgggtgtagcgatcgagtttacgaaactgtcttttgaacctggcggttacccggaactgatatttcacaggtcgagttctttcttgaactcatcccaggagtaggatttctttccgtcctccatccattcgcggtgagcctcatcggctactgccaggtcgaactcgtcttcgatcttttcaaaaagtgcctgcctgaaggcttctgccaaggtaatcgaatgcaggttcgcatagctggtggctagttctttttcttctgcactcatcctgatagaaaatgccatctttcccctcctcttgtagtacaaggtactacaagcgttctagggggtcaatagcttgcgacaagttaaagcattagccgccactgaactagatcctggatgcacggcagccccaggcgcgccttccagaattgcttgccgcgataagcggtaaggggcgaggtgtgggaggatggggctatggaaaaagctgaagtttccgccagtacggttaagcgggtttcgcagatggaggcggcgctggtgcgcctaaatgacgcgattgcaactgttgagggcgcgctggatacctatgagcagatgtgggacgattatcgcgccttggatagctactattctggaaaagcctggtgggaagacttagaggctgacaaccaggggcttctacccgaggatttgcctcgcggggtactttccgaggacgcgctttatgacgccctcggcgacgccgaagccctccgccagcgcctaacagaaatcgcgcaagccgcgcagtaaaacacacgtcactaacccgaaaaggatattgagcgctttatcctgctttagttgcacatacgcaactcagatagttttgctgtgtttacgtaactgcgctgcaaaaaacatcaggcataggtttattgtcaagagcagtgaaaaacgtttccggctatgcctgttagcttaaacgaattccaaccctgttcaagatcgcttctgccgagcgagattatcctcaaacatggaaaaagcggctcccgtttacgacaatgcccatggcgctgactagccgggtgtgcgaaaaactccagcttcccggctgaaagttactgcaacgcttccactaccgggtagagctctggactgtcagcgcctagactctgtgaaacaccgccggtcaaagccagactagtgattaccaggagcgcagaaatgcgcttaagtaaaatctttaccatttgagaacacctcccttgtattacttggcttccacctgttgctatgcgtatgagggagtccgctgtgcctaagaaaatgaacagcccagttagaaagcatttgtggtggcaaatgctccacctatttacaaagcgcctcttcttgtccagctccgctatcgcgttaaaagatgcatgcaacactggcggatagcgcgtaacttcgacctcgcaagtcgtagtaagttcgcccctatcgtgagaaacgaaaaaatcagcaaccaacctggaatcaaggtcactagcaagtctttgtatcttgtccataccccctatatagggcgcgagagcaaaaacccaggtgaaagctatattcccactgtgtagtattggaagtttttaagaaaagggattttgttaagatttctgtgtgtgcaagcaaaattgggacgatggcctcccaaacggggcctaccagataccgcccagaacaagatgcgagaagtacccaatcagcgacattgtgccttgcgatatagaatacttacgaatccaagggaatcgctggacccaggccggaagactgactgagttcgtttttgttctccaggtcagaaacaaaaacactggcagatggcaaacgcacctttcgatagactgcacacattccaacacccacattcaccactacaaagatggggaacgggatgacagagcgcgcgaaacgattaaggtacttaaccaagcaagggatgttcaggacgcattgggaatggctatactgagaatcagacaagagattaataaactggtggaggtgcgaaagtgaacaaggaattggcggactttgagaacgaagtcctctacaacgtcatgcttgggactaccacccctaaagttatagattctaggggtcacaccccgcttattgtctgcctggaaaacgaaaccgttggcaccctgctagctagaatcgaaagagccggaggttgcgggaccgtatatgccctatccgaaaccggcgaggtcagcgtgatagcagtgcaagacaaagccccggaagcacccagtcccaccgacctagcagccgacaccctaagcgaaaactcccctatcggattatttatcgaatacatttctacccaagaagatggtgtttatctcaccggcgcaaaaatacgctcatacggcaccgccgaactgaccaaggtttaattcccgcaattccagctaccgctgaccgatccatcagcggctaaagtagctgcgaaaggttgttcccaagacaggcttaggttcgatctgccgcgccggccttctagtgatatggaggcgttcggcccggaagcgtagatagtgagcgtaccgttgcatgacccggtaagggtagtacttgcccgcctgtttgccggggcaggagcaggcgcgggtgctacgggccgctggataatagtcctagtgggaaccggggcaggctttaccgggacaggcgggatttcctttttcttcagattatctaccgccaaagaagaaaataccccagcccccaggacaagacctaccactgccacgtacgtaataaacgtaggcgacagtagcaggtacttaaatgtgccccaggggctacggagtagcggcctatcagaagaggtcatcaccctctacctcgtctactaccggggcagccttagcgactttagccttggggctgcgggtgctcttagccttggacttaggcgcgggagcgtcttgctcggcgctacctgcgctagagccaggggctctatcctcttccacaaccggaggcttatccgggctataactaacctttgtagcctcaactgttcatggttctcttttacctcgcttccgtgaataggagccatttccaaaaacggaaagagcaaattgcgtttctggcattgttccctgacgatgatttccagggttcgccaaaaactccacctccccgaccggcatctgctccagaatctccgctactgggtagaatccaggactgtcattgcctggattgcagggaataataacgcttaacgctaatgcaagcagtgcaaaaagcgccagagcgcgtttcgatacgctttgtatcatcttggaaaaccctcctgtctaaaaattttgctttccacttgttgctatgcgtcaatcacgattcgggggcaaaacagcaggtggggaagaaaataaggatagggttgaactaccccaacactgaagacattggggcttcttgtttcatccaaacattgcccgttttcccaacgaacgtatagtccattggtgctactggtcttacacgtttttccgcaagagttctgctatgttccgtagcagaggcgtttatagaccgctcacgtcttgccactaggttcacctcccctaaaacgactccgacttcttatttgcactacctatatagggcgcggggtaatggggggaaacacaagacgggcaaaaataaaaccgctggtcaaggtagttgcgaggtttatcagcatacattcgcgtcccctgccccccattcatcggcagagctaaagaccccgccggtttctgaaacaaggaacgctttaggttctgcctaaaaatctaaacggggagataaaaaaagaacggctcatgttccttagtgcaactgctcagaacgcaatccttgtctgtgagatagttactatgattcccttaacgagtttagaactgcctgcgtggaaattaccatatctccacgatctgagtcgattagaacaaaatcaaagctctcatagaaactgcgaactttttcttcaggagcctgcaagattaaaaagcgcgtgcctgtcatgccagcaatatccctatacaccttaaatacttcgtgcataaggatgtagctcgctgaagtaccatgcaaggattgggcaacggcaaacttgcccaacagctgaccgggatgagaggcagcagtagaaatcccttcccgcataacacggggtagcgctttggaatctattacttgggaagataggcagaaataccctagaacctcagtcgagccttgctcgcacattacccatattgccgactggtgacgttcttcgtattttcttccccatttaatcagccaattgcctaaagcgttcccatgcccacagtcgaaccaatcataaatatgatcctcgttaaggcgttctactgtgtagctcatgcctcaactagcccgcattgagcgaaaatctctctagctttttctccttgttcagctcctagagtttctaaaatctcagccccttttgcggtgataggcataatttggggaggggggagcaaatagaaaagctccggaggcatttttctccacaaaaagaaatcaataatatcttcgctatccaggtatgaccgcctggtaccttcctcgcgaccttcccaggccttaatccaagggtcctcctggtgcgtcatctccaccaagtcccactggtcaatctccccgtagtattcccagactgcttctacaacctggtctaggtagaaatcatcctctaagggggcatcttcaaaagtggcgcaaacttgctcaataagttccaggctgactacttcttgctcggaatgtaaggaaagcaaatcccctacgaccggtccgtatgtcatggcgtaaaactgctgcctaaacaaaggctcgccggtaagcctgccataccaaccataaatgtagtacatgagcttttctagcttaattgccgaaatttccccgcgtccgctcacccgaaatagacgggcagcaacatcaaataccgaacgttgcattcctagccacctccccgcgaaatagaactgtctcctttttaatgtatcttaatgcatccagcccaaacaaggcacatacacttacagccccagcaaatcgctagggctgtaaggttaagaatggttagttactagcaaggccaggaattaccttcgctatcgccgcattgacgcatactggtggtaccatcaccgttgtcagtgtatttccagccatcttgtatcacagtcttgggaccaccactgttactaccaccgccagagttaccaccagagcgaggtgcctggtagttaccaccggagcggcgaggtgcctggtagttagagcgggcttgcccctgatagttaccaccagcttgagtctgggcttgagcctgggcatcagcagcagcttcagcctctgcctgcgcttctttttcagccttcaccttagctacgtagtccttagcagccttaacgttacgttcaataatctcagcctgcttttcctgagacatctgcacggcagtaggtatcttatgtgccgactcgccctgcgccttgggagcagagctagaacaccccgccaaaccaatagctaaaccaacagctgccagtacaggtaaaatctttcgagttttcatcatttaatccattcagttatatccaacgacttcctcaagtacccataccgggcgcacgagcaaaaccttggcgggaactatatgcaaccattatatcgctttaagaataaaataactagcaaaaggaactacaaatcaacaggtagcggccgcaaagtattagccataaagcagctgcccgaaacctcggcgaagatcagcattagatccagccggaaactttaataaaaatcaaagcgggaaccaaaagaatccggcgagaggaaatatttcctctcgccggatggaatgttaggttattgtgcttttaaagttagctcagaatttttagtatttagtcccgacacgcccacatattgcgatttcttttttaaaaaatacagctaagacttgcggaaacctgcttttacagttttgttttattgactttgataaaggcgcgccagctcccccaaagttttacattccacaatctggccatcggagcgtttttctcccagtttcccttcgaaccgcgccactaccgcatacagcgacaaatcatcgaaatctagctgcgttctcaaccccgtctctggccgcaaatctgtctgttcacagttaacttccgcggcaacggcttccaaaagacaagctataacctccgggtcgccgctaaagttttcccaggcagcagggatattttccgaggatatatccgggttgctaccgctgccttcctcgaaaaccgccccagattccgcggtagaactacgtacagattcgtcctctcccccgctttcatcctccgagccgcccggcaggtttttaccgaaatcggcgagcgccgctaaggcatcggcatctagcgccatctcagcccactcggtgcagccagcgcaccggcgctccggctcccgcatatcggaaaggctcgagttcttcgtcccaagcggttcccagtgccaagtccagcaagcgccgcaactcctcttgactgccttgagaaagggcaacgcgcacccggtcttcgggcaccactacgttgcccaccacatcggtttgggcatggaagattcccaggtcaggggtatatgaccagcgtcccccattgttatttacggaggcgtcctcggttacctcgaaacgcagatgttcccatccgcgcagggcggaggctagtttagcgccggtaccaatctgccccacccaggacagttccgagcggaacattcccggttgcgcaggctgttccgtccactctaagttgacgcgttgatctagaactgcgccaaccgcccattccacgtgactagaaagtgcacgggggcatgagtgcacgaaaagtacaccgcgggtgtaatccttgttcatcgcttctcctttagtgctcgcaaggttcgtcttccccaacggcctgtgcgcacctaagagtgatgacacgcggtgtctcactttctattttgccctcgataacaagtttcaacaagcccaaaagcctctgaccaccaattttgtgaccactgaggctaatgtgacacctgtggtttagagggtgggtgtcaaagcgcggggtgcggaggaaacgcgagaacggactgagcagacgcgcaggatcagttttctgccaggacaggttccggcgttggatgtaacctcgcgtggggcttatcaatggcgcggggactagattttccgatagggctaggcggacgtaaacctcgaaaaacacctacggcttttccgaggttttgggcaggagaaaaacctagagctcacgctaacttacaaccaccaagctcttatcaagggcgaacgggaaaagatgcgggagagaccggactagacgcgcgggggctgagtttgatccgagtaggtgcggtgggcataagaattggggagagactaggtctctccccaattcttgggcgggaggacaaactcagcccccgcgcaccggctcagctacaggcctttttcacgaatctctttaaaagctttacggcgcgttaaccgatccaggcgatctaggtacagatgcccatctaggtggtcacattcatgctggatacaacgccccatcagctcttcaccctcaaccactttcggcttgccatccaggtcaatcccttcggcacgcgcataccaggcacgcttgcaagggaagtagagtcccggcaccgacaggcaaccttcatcgccgtcttggtattcgtcctcagatacctccacgagtcgcggattcaagatgtagtcgatttccccgtcaatgttccaggagaaagcccgcagccccacaccaatctggttagcggctagaccggcgcgcccatcggcatctaccgtttccagcaggtcttctaccagctgttttatatgttcatcgatttcgcccaccggttcacagggggtacgcaaaatcgggtcaccgattactctgatttctcgaaaagccatggtctatttctcctcatttccgctcgccggaacgattttttctgcccgcgcataggcttcctcaagatccttgcgcaccttgtcacttacatactgaaaggcatccgcaactgcgatttcttggcgttcgccagtggcgcgacaccgtacttccacagttccatctttgagcccgcgtccgatcactatcaaccagggcatgccgagcagttccgcatccttgaacttcaccccggcagatactttcttgcggtcatcaatcaaagtatcgattccggcggcagtaagctggtctcccaaagtctgcgcggcctcgaaaagttctgcccctttaccagtaaccagcacgtgtacttggaagggcgccacattagtgggccatttcagccctacctcgtcgtgatattcctcggcaatagctgccatgacccgggaaactccgattccataggaacccatggtaactacctgggatttcccgttttgatctagcacgtttagccccagggcttcggaatacttcgttccgagggcgaatatatggccgatttcgattccgcgggcggtctgtaaggctccggaaccgtcgggagccggatccccatcccgcacttccgcggcttcaataaacccgtcagcgcggaaatctctgccggccaccaggtgataaatgtgggtgtcttctttgccggcgcccgcgatccattcggtaccttccactacccgcgggtcgaggagacagcgggggctgccggagatattcccgtcctcgtctactttccgatccggatggtcaggcccggcgcaggtggggccggtaaagcccggcacgatattggggtaggcggccatatcttccggggtggccatttccacatctgcccctagagaggcttccaggcggcgcatatcaatctcgcgatccccgggtacccctagcagtagcacttcccgtttcccatcggcataggtggcggcaaccatgaaggctttcaaagtgtcagccttattccattcccggccatcttcgcgcgggaaatgctcattcgagtaatccactagcgcttccatagtgtgtgtaccaggggttttacgttcaatcgccgccggaacctgcgaataatctttcggctccggcgcaatggtagttaccgcctccacattggcggcataaccgccctgggagcggacgaaagtatcttccccgatagcacaggggaatataaactcttcggagcgcgatcctcccatagcccccgccatcgcggaacaaatcacgaaatccagccccaaccgcgaatagatccgttgataggcacggcgttgctcctggtaggaggcttctagtccttcttcgtcaatattgaaagagtaggcgtccttcataatgaattcgcgtccgcgaatcagccctgcccggggacgtgcctcgtcccgatacttttccttaatctggtagaggacgaccggcagatccttgtaggaagaataaaagtctttcaccagcagggtaaacatttcttcgtgagtgggtgccaacaggtagtcagcgcccttgcgatcctgcagcttaaacagggaaggcccgaactcttcccaacggttggtcgcttcatagggttcgcgtggcagcaacgccgggaaagccacctctagggcgccaatccgatccatttcttcgcgcactacctgctctacgcgccgaatcgtgcgcagccccaggggtgtccaagtgtaaatcccgggcgcggcacggcgaatataaccggcgcgcaccagcagtttatgggaatccacctcggcatctaccgggtcttcccgcaaagtcctgacaaaataagtcgacatattgtaagccacgttcgccagtttagtagatgattcaaaggaacctaaaccgcgcccgcctcgcaggaatcaagtcgtctcgcacctaagtgaggtatgggcgaaaggtaccgtatggatccgcgcgagcgagaagtttttcctcccgcatacaacgtacggattgcatctcccaagacttggaactaaagaccatttttacctccccactcgcaaggcttacggtcggtaagctgtacccgcccggttgggtttgagcgcgcgtccggatttttctaagacaacatccagcaacaagaagcgcaaccatatggggagggctggctgtgagcgcgggagagaagttttatccgagtgggctaggtgggcgcaaaattcgcaactgccagcgggcagttgcgaatttttgggcgggaggaaaaacttctcttccgcgcgtaaaccgtcgctacgtttgccgaattcttgggcaggaggaaaaaccaatcccccccccgcgccgcaagtagcaaactcgggaagcttaacgaccaggaatcgcgacctcaacttggccggagccttcttctaggcccagcagctcagcttggcggtgcgcctccgcaatcagagtaggtacgatttcctcctcgggaaccgtctttatcactttgcctttgataaaaatcttgcctttgccgttaccgctggctaccccgaggtcggcttcgcgtgcctcgccaggaccgtttacgacacagcccattaccgctactcgcagcggcactttaatttcgtctttcagggcatccgtaacggcgtttgccaacgtgtaaacatctacttgggcacgtccgcaggacgggcaagaaacaatctccagggtgcgttcttttaaccccatggactgcaggatttcaatcccgacttttatttcctccaccggatcagcagacagagaaacccggatagtatccccgataccttgacgcagcagcgcgccgaaggcggtcgcggatttaatagtgccttggaattgggggccagcctcggttactcccaggtgcagcggccaatcccccatttcgctcagcagttcataggcgcgaatcatagttaccgggtcatggtgtttgaccgagatcgcaaagtcgtgaaaatcgtattgctcgaatagccgcgcctcgttaaccgcggattctgccagcgcttccggggtggctttgccgtggcgtgccattacccgcgggtccagggaaccagcattgatcccaatccgcagggcggtgccgtgtttgcgtgcgcatttggtgatttcttctacctgatcatcgaatttgcggatatttccggggttaacccgcaccccggcgcacccgccctcaatggcagcgaacacatatttaggttggaagtgaatatcagcaactaccggaatagtagatttttgggcgatgaccggcagtgcctccgcatcatcagcgctggggcaagccacccgcacaatatcgcagccggcagcggtcagagccgcgatctgctgcaaggtagcaccaatatcggtggtcttggtggtgcacatggattgcacgctaatcggggcgtctcccccaatagctacgcttccgcaacggatcttccgagttttcttccgcgggaaacccgctggcccaacttccggcattcctagttcaacactcacgttcctattatgacgcgttcagccgctaaagccctattttctagaaataatcagacctttcccactgctgtcaccagagctttttcgtatgctcgctgagggcgaaagctcaaaggaagagtaaaacccagcggcagacgctacggcaagcgaatcggatccacaatatcggcgaccatcagcagaactgtcatcgcaatcaatagcccggccaccacgtatgttagcggcaccgctttcgcggcatcaattgggccgggagcggggcgagaacgcagccgcgcatagctgttcttgattccttgccaacaggcaccagcaatatgccccccatctaacggaggcagcggaatcaggttgaatacaaatagcgccatatttagcgaggccagcagggaaagcattcctcccgcgcggtcagccaaggttatttgggtagcaggggcggaaccgatttctcccgcgatgcgccctacgcccagaactgacataatccccgagctatctcgcggagtatcggtgaacaccgagacccccacattccacactgctaccggcagttttaagactaccgctccggtttggtaaaacatttgccacatggtttgcccataggtggctatccccgtgctttgacgcaccgaacgcgcgtagaggccggctttcccctctaccccggaaagctgcagatcgataacctctccgccgcggcgcaccgaaacggtagcgtctccatgagtagccccagcatatttgcgcaggtcttcccaggtgttaatctttttaccattccaggcgaccaatacatctccggatttgatgccggctttggctcccggtgacggctgggctccctcctgggagcattcgaccacctgaccggcttttagacacacagctttatcgaccgtggtggtgggggtggcaatcccaatccccagcatcgctacccccatcagcacgaatgccaagaatagattcatgactggcccgccgaacattaccactaggcggtggcgtactggcaggttatagaaggcacgaggacgctgctccaggggaatctctgctagggaggcatcgcgcgcttcctgcgaccaggtaggaaccaagtcttcagcttgctgtggatccagggcgcgtgcctcgcgcaccgaaagttttttaccgtcaagtttgtatccaaattggtcagggtcacccggtccatacattcccaggatccggcagtatccccctaagaggatggcttttaccccgtactcggtttccccgcgtttgcgcgaaaacagggtgggcccaaaaccaatcatgaactggggaactaacgccccgaacttcttggcgggcagcaaatgtccacattcgtgcaggccaatagagataatcagtcccacaaccagaattattattcccagcaaaaacgccatggaggtaccctacctagtgtttatgacaatttcctgagccttggctttcgcccaggtttgcgcttccataatctgccctaaatccggattatcaataccgatatgttcagataatacttccgctaaagaatccactatttgcaggtagggcaggtttcccgccaggaaggcatccacaaaaacttcattcgcggcgttatagaccgccgggtgcgaggccgaggccgccactgcagctcgggccagttttattgccgggaaagtttcgtgatctaccggctcgaactgccactgctgggcgctagtgaaatccagaggggtaaccgttttttctaggcgggtcggccaatctagtcccaaggcaatcggaagacgcatatcgggtggggaggcctgcaaaatcgtggccccatcgcgccaagtaaccccggagtgaataatcgactgcgggtgaatcaccggcacaatattttcgggatcaacatcgaacagcaaatgcgcctctatcagctctaaccctttgttcaccagggttgaagaattgatagtgaccaccggccccatcgaccaggtggggtgattaagcgcttgctgcgcgctgacctccgctaagtccgcgcgcttcttgcccctaaacggccctccggaggcagtgagaataatctggctaacttcactgcccccatcctggtttacgctggtgagccccttatggtgcacacccgaagctaaagcctgggcaatcgccgaatgctctgaatcaaccggcacaatctgtccagggcgctggcaggctgcttttactagggcgccgcctacaatcaaagattccttattcgccagtgccagggtggctccgctttctaaggccgccaaagtgggagctaagcccaccccgccggtaatcccgttgagcactaccgcttcggggtcagctcgcccagccagaagcgcactagcatcttccccggtcaaaacctcgggttgatatttttcgctactgccggccagttccgcagctagcgcgctagcgaactcttcgcccttatctaaagaaatcgccaccatctcggggcggaaacgcgcggcttggcgcgccagtaaagctaggttagatcccccggcactgagggcgcggacacaaaaacaccccggattttgggtaataacctctagggcttgggtgccgatagatccggtggatcccagaatgaaaacgtcgcgcactgcctccccaatcaccggtattattttggcggcatttcccgcccaccagcggctattctaccgccagcagtacctctattgcccgcgagagataggcatcgaccacgccctctttataggctttttcattcttggcggttttgaaagtggcactgcgaatctgggcagaagtcattccctcatcagagtcaaaatactgtgccagccggtcaagaagctcatccacctgggcggcgtcataacctttgccatccggatgggcgaaacgtttaccccgaggacgcagcatccgcggataaagagtggttgcccgctgggcaacccgctccatccaggcctgagaaccattaaccgccacgttatcggcgcggtcacggcgcacgaacgccgcctctagccggtccattgcctgatcgatggcgctagtttgataaccgcgacgcaccaggtcaaaatgggcaccccgcacctgggcagccgagaatttttcagcaggcaccccgccctcataggctttacgcgccttagtgaaaaactcgtctacctgggagggatcgtatccccgcgtaaaataaccggctcgcggaaagctgttctcactcatttgccagccctctccttccgagatttggtcgccaattggccacacgctccgtcaatgtcctgtccgcgagtatcgcggatagtggtagttatacctttactctccagggtatccacaaattctgcttgagcgtgggattcactcgccgtccagatagatccgggagtgggatttaagggaatcgggttcacatgcgcccatccgtgcccgcgggcattcaacaaatccgccagcagccccgccctccaggcttggtcattcatattcttaatcagggcgtattcgatggaaactcgcctgccggtagcttgaaaatactggtaggcggcatctaaaagttcactaaccttgaatcgagaattcaccggaatcagctggtcacgcagttcatcatcaggggcgtgcagtgaaatcgccaaggtgagcgggattttttctgccgtcagtttcttaatccccggcaccagcccgacggttgaaaccgtgattccccgcgccgacatcccgaaaccttccggcgggtcagcaatcaggcgccgcaccgcccccatcaccgcgcgatagttcaccatcggctcccccatccccataaacaccacattggataggtgacagggatccccgccaagttcgccctcttcgcaggctttacgcgccaagcgcacctgttccacaatttcggcggtagacagattgcgggtcagccccatttgcccagtagcgcaaaacggacaggccattccgcatcccacttcgcaagaaatacacagggtagcgcgggagggataacgcatcagcaccgactctacttccgcaccatcaaatagtcgccacaggtattttcgggtcattccctgatcccccctgcgcaccactacttgctcaactaggggtggaaaagccagatccgtgagcttttcgcgcccctgagcgggcagatccgacatttgctgcggatcaatattcagccgactgaaatagtggcgggataattgatcagcgcgaaacgccggaaaaccggcttcttttagcagttgcttgcgtcccgccaaatcaaaatcagccagatgtacctgcggttttactcgcctggttgcttgaaaacgcagcaccggacgggcatctgggctactggcaccctcgggtacttgatcggtgggcattacttgagcgggatcgcggctagggcgagccctgcgcatcaagtctttatcgttggcagcactattggggaggacgcgtcccttccccctgcttttagcggcgcttttcccttttccggaggctttttctttcgccattgctgccgcccttaaaagataaatagggagactacgaagaacagcggcaccgtgattagcagcgagtccaggcgatccattaccccgccgtgaccgggcagcaaatgccccatatctttaagctgcaaatcccgcttaatcaaggattctcccaggtcgccgcaggtggcaatcaccggggtaagtaccccaagtaccgggattgcccacaacggagtgcccgtcacccagacggcaatagcagcggccaccgtacacatcaccaccgagccggcaaagccttcccagcttttcgagggggaaactgccggagccatcgggtgcttacctttaagcgcccccgccgcatagccgccaatgtcattacagatagtgaccacaatccaaaggataatcggcgctggatgatgcgggttatgcagcataatcactacaaaagaggccaggaacggcaaatagatagccacaaagcaggtagctaagaggtcgcgggtagcaaacttagaaggtcccacgcttaggcgccaaatcgcgcaagcgattaacgtcgccagcagcgccgcccacagcccctccgggcctagcagataggcacaaagcagcatcccaatagtgcctacccaaaggggaggcaggcacagttttatccggatacgcgcaagggctctggacatctcggcttcggccataatcgccactaccatagcaaaaaccaggaataaaaccgtgggtgccagcagtagcgccagtgccaaggctcccaggcctatccccaccccaatcgaggctggcaggttacgacccgcccgtgattttttagctttcttgggcgggttcttagcaggctctgggttcattacagacgcagatccctcgcttaaggcgtgggggctgggattcaactacatctccatcaattctttttctttggcatctagcagggtatccatggtatcaacctgcttcttggtcaaagcctcgatttccttttccgcgcgggccacttcgtcctcgccggcatcgccatcttttttcaacttcccaagctgatccatggctttgcggcggataccacgaatcgtgacccggccttcctcggccttttgccccgcgagttttacatagtcgcggcggcgttcctcggtcagctccggaagagttacccgaatatggttaccttcgtcagtcgggttaacccccaggtcgctgtcacgaactgccttgataacgtcgctggttgaagatttgtcatagggggaaatcagcacggtacgcggttcgggaatattgatggtggccagctgctgcaaaggcgtaggcgccccgtagtactccaccaaaatcgggttaaacatggcggcgttggcccgcccggtgcgaatcgcagtgaactcttcccgggaaaactcgatggctttttccatcttgtcttcggcctcgagcagaatatcgtcaatcacttggctactccttttcagcagaaactaatgtaccgattgtctcacctagcagggcggaagtaacgttgccaggctcagacattccaaaaacgcgggtattgagaccattatccatacaaagactaaaggcagtggcgtccataaccttcagttctttttggagagcctcctgataggtgaggtggtcaaacttggtggcattagggtcacgcttgggatctgcgctatagaccccgtcaaccccgtttttacctactaatagctcttggcaatgggtttcgagggcgcgctgggcgctaacagtgtcggtagaaaagaacggaagaccggacccggcaccgaaaatcactacccgccccttttccatatgacgcaccgctttcaagggaatatagggttcggcaatctgtcccatggtgatggcagtttgtacccgggtggttactcctgcctgctctagcagatcttgtagagccagggagttcatcacggttcctagcattcccatatagtctgcccgcgcccggtctaggccgcgctgggaaagttcggcgccacggaaaaagtttcccccgccgactaccactgctacttgaactccttgttcaactgcggctccgatctgttgagctaccgaattgataacgtccagatccatgccgacgtgtccgcccccaaaaacctctccggacactttcagcatcactctgcgttgtttatttgcgacttcttggttcacccttgtccccttaaaatatcgttactggccggtaggcaacctgttactaccttaacccgagattactgcctggggagctcccccaaatgcttcttacttatttatcccggcaaacccgggtttttgacttgcgaacataaaagtgtggcctcaggattttcctgaggccacatctttatttgcttaagaacctacgtggaaacgggcaaaagcagtaactttaccgccggccgctttcacgatctgtcctaccgacttcttgggatctttcgcaaaatcctgatccagtaggcagttgtccttgtagaaggaacccatccggccctccacaatcttgtctacgatcttttcgggcttaccctctttaatcgtcatttcgcgcagagtttcgcgttccttatccagttcagactggggaacttcctcgcggtcaatgaaacgggggctgtaagcagcaatgtgcagcgcgatatcgtgggcaacttcagcgcccgccttatcggtggccaccagcaccccgacctgcgcgggcagatccgcggaggagtagtgcaagtagctggtcacggcctcgccctcaatccgggtaacctgtcccaaaacaatgttctcggagaagagggcgccgatttcctcgaccttgtctttcacggtgccttcgccgcatttagcctctagcagctgttcgcgagtgcttactccgctgtctaccagtgcctgcatgatttcctcggcggcctccacgaacttgggggacttgcccacaaagtcagtttcggagttcagctctagcattaccccagcctgtccgtccgcggtatccagcactttcgccgttaccaggccatttgcggtagaacgatcttcccgcttagctagggatttcttacccgccaaacgaatcgcctttacagcttcgtccttgtcgccgtttgcctcttccagtgctttctttacttccatcagacccgcgccagtcagttcgcgcagttccttaatgtcttgcatcgaaatagccataagtatgttcctctcgttaacgatcctcagcggattattcagacttttctgcttcagccggggctttttcctcttccgcgggggcggcaggggcttcttctttcgcgtcctctgccttttcggctttcttgtcgccggcttcttcgctagcttcgtcctttgcggcgccttctagcagttcccgttcccaatcggctaagggttcttcgctggcgggagcggccgcttcgccttccgcagcggcttcttcgctagcttctttcttagctgccgccttttgcgagcgagcaatcaagccatctgcgcaggcatcggcaataatccgggtaagcagggctaccgaacggatagcgtcatcgttaccgggaatcccgaactcgatctcgtccggatcacagttggtatccaaaatcgctacaaccgggatattcagtttgttggcttctgccactgccagatgctctttattggtgtcgactacccagatagcggaggggatgcgtgccatatcgcgaataccacccagggtgcgggtgagtttatctttttcgcggctcatcatcagcagttctttcttggtacgtccagaaccggaaacatcatcaaagtcgatttgttctagttcccgcagacgctgcaagcgcttgtgtacggtgccgaagttggtgagcatgccgcccagccagcgctgattaacgtagggcatccctacccgctccgcctgttcggcaatggagtcttgcgcctgtttcttggtgccgacaaacaggatgtttcccccgcgcagcacggtttgctgcacgaaatcataggcacgattgatgccatccagggtctgcgccaaatcgattacataaatgccgttgcgatcagtcaagatgaagggcttcatcttggggttccaacgccgggtttgatgtccaaaatgaacgccgctcttcagcagctcagacatggttactaccgccatgacttcctttcagtgcgctagggcgcacgtgttttggggctattgccccggtttacggtttccattcggttcctggcacgacgtccactgacacccatttttactggtaaagaccgctttcgggggtatcccctagagcttgccgccaccaaaaaataggaccgaagccagcgtgacccagcaaggctggtagtcgtacgcgaagtcacctgggaatccaggtgctaagagctatcttagcggccttgaggaactaccccaagctgaaagtggcactgagcactgttaatctgctgacagttttcaaaagaaaatactggttattcagtttgcgaagtttgttttggttgttccagttgttcctgcggcttcttctgcggctggcgcctggttacctatctgactttcgccggttgcctacctggtttttctccgtttgtcctccggggtatataagggcgcgtcatcctggtctgtttatttactaaatttttgcggaggctgcgggcgggcaagctgagggagtgaagaagaatctctactccttcggggcgctactagcggctttggtcgcgaccttactcttggctttttcctcggctcccccggctcttgccagcacgggaggtcaaggatttgggcaaacggtgaatctggcgcagcttgcgggagagatcggatattaccagtggccaagtcgccaccgcgtcgagattctacgagcttttgaccccccaagctccccttggggtagcggacaccggggagttgatttagcaatgccggcaggctgtgaggtttttagtgcgcgcgcgggaactgttttctttgtcggcactatcgccggtaagcccagtatttcgatcaagcatacggagctgattcgcactacctacaccccggtgaaaagtgacttagaggtaggaacgtcagttacagccggtcaaaagattggaaccttggaggcgggacacccggggctacattttggggcaaaaatcgatgattaccactacctgaatcctctattgctgattctgggaccgattcgcctactccccgactcttaaaccggcttttggcggtcgctaacaggggaatgcgacgtgaaaaaattttaggcgcgggggaaagcctgctggtaggcaccgattagacgatgggcatccacatgggtgtagcgctgggtagttgacagcgcggaatgtcctaacatttcctggattacccgcagatctgccccgccctccaacatatgggaggccatcgagtgccgcagaccgtgcggccctaaatcgggtactcccgccagggcacaggcgcggtgcaggcgtccgcgtacgatcctttccgaaattaccccgccttgggctcctaagaatagggcgtcagtaggcggcaacttttgcagctctccccgcgccctctgcaagtagaagcgcaaagcttttccggcctggggactaaagggaactattcgttcttttgatcctttgccccacagccgcaccgtgcgcgagttgaaatcaatatcttccggtactagggcacaaatctcgcccacccgcgccccggtggcgtaaatcaactcgaagatcgcccaatctcgcgccatcaccgcgctagtatctgcctgactttcgcaccaagcaagcagctttttagcttgcgaaaccgataacatatgcggcagatttttcgcggttttcggggtgcgaagttgcttcgcaaaatctgtttccagcacttggttttgttttgcccattttgaaaaagcacgcagcgccgcgattttacgggcaatagtggtagccgattgtccctgggagcgcagctgcgccaaccaattacgcgctgccggcaaagtgcaggccggtaaaatcgattcttcttcggtaatctcgcaatgatccagccagccacgcaaatccgctagatacgccttaatggaggctggagagaatgatttcgcatactgcagatagcggcgataatcttctaaggcttcgcctcgcttcaccgctcgcatccctagactcccgcctttttccatttgccatcaagttggattacccggccatccatttccaggttacccataatggacagcacttcttcgatggctgccccgctggcgcgcgcaattgccgaggcatttgccggactccgcaacggagtagcatccaggattcgggcgcttagcggatccaggccgtccaagtaccctgtctgcacccgcatcggatgggcagttaccgtccccaggggcgcaatcatttcttgcacgtcctcggcactgctaatcaaagtggcgccatctcgaattaactggttggaacccgcccattcgggttggttaatcgggccgggaactgcccccacttgccgccctagttccatgccgtgccgggcagtattgagcgctccagagcgaaaacccgcctggatgacgacagttgcggccgataacgccgcgattaggcgattgcgatctaagaatcgccagcgtgtggggcgcgatccgggcggatattgactaagcaacaagccgctgccagaaatctgtttaaacatctgcgagttcatagccggataaggacgatccagacctcctgccagcagactaatcgtagggatttttgcccgcagacaagcctggtgaaccaggcaatccaccccataagcacccccggaaaccagggtcatcccctccccggcacagcgccaggcaagttcggtggcaatatcgtgtcccaggttggaaacggcacgcgcccctaccatcgccaccgttttttcactctcctgatttagcagggaagtatccccgattgcccacagtgcccagggtgcgttagcgacatttgcaaacgcggctggccaatctggatcgcgccgagtaactaacttaaaacgccctcgggagagcatcttttctaaggccggtaaatctagggattctagacgcccccgccacctagaaaaacttttatcccacttatctccgccgctgcgtcgaactagctctaccggcagatatcggtgccaacgctgcggatcatcactggcggcgcggcgtgcaatttttaaagcggcaaccggtccgagttcactaagcagtaaatctgccgccaaatcttcggcctcagttagcattgaccaactggcacaggccaatcggtactgatgattatcttccatacttcctcctaagagctgtgcgaagttcgcagcgaataggccagaccaaaatcttcgctggtgggtttatctctgcctttaagatcagcgaccgtccaggccacccgacaaatacgatcagcgccccgcatcgaaattcttcccgaacccaccaggtgatccaggcggtctttagtggcggaatctaaacgctgcctcaaaatacggctggggatgcgagcatttagggtaactccctgctctttccagcgataacgcgcacgttctcgagcagataacacccgctcgcgcacggttttactggtctcgggtacttcgtcagtggttaaatcggtaatttttggtcgccctacccggcattgcagatcgatgcgatccatcagcggccccgatagccgcgccaaataccgtacccgctggtaaggagtacatttgcattcccctcccaactgtccccacatcccacaaggacacggattagccgcaatcaccagctgaaacgcggccgggaaactggtgactgcccgcgagcgatgcacggttatttttgaagtttctaaaggttgtcttaaagcatctaggctgcgggtttgaaactcaggggcttcatctaggaaaagcacgccccggtgagctaaggagatcgcgcccggggtagcaatcccgctgcctcccccgatcaaagccggcagcgtcgcagaatggtgcggggcaataaagggcgggcagcgcatcaggccattggcaggcataaaagttcccgccagggagtgaatcgaggttacttccagggcttcttcgtcatttaacggaggtaaaatacccggtaaacaacgcgccagcatggttttcccagatccgggaaccccgataaaactcaggtggtgtcccccggcggcagctatctccaaggctttgcgcgccaggaacgctcctcgcacctcctgcaaatccgggggatcatcgatcgctgaggccggggatacttgcggggatgcaggtttatctagggttttaagctgcgctacccgctctttcatctttcgcatccctaaataaaacagcgcttctaccaggtgcgatactccaatgatttctattccctcgattagggaggcttcggcaaccgcttcggaggccaccatcactttcttaaagccggcacgtcgcgccgccaaaacctgtggcaagattccttttacccgatagactcggccatccaagcccagttccccacaaaacaccatcccctctgcccgtttttgcacccccgcatagcgggaggccaccactgctagcgcgatcggtaaatcaaaaccggagccagtcttaggcagttccgccggggaaagattaaccgtcagccgggtaggttcccaccgcagcccggtagaggcgatcgcggcctccacccgagcccgagattcccgcagtgaagcatctggcagtcctaccagtgcaaatgctggtaatccttgagtgtgatgggcttctactttgattaggtgaccgtttaaacccaccattcctagcgcgaaacaagttccgatttgcgccattttaaatcccccgacagtgggtaattaccggaacttttccaccggagacatcaatggcaatcagatcaatccgtgccccgtaccctttcccaatatctgggtgtcgagatagccatacgctgaccagctggcgcaggcggccatatttttcgcgccctatcccccgcttagcgcccccatattgctgagtggtacgggtttttacctcggcaaatactagacgcgccgaacgcggatctcggcagataatatcgatttccccgaatcgacaccgccaattgcggtcgattatctggtatccgcactctttaagcatccgggctgccagattctctcccgccgccccgatttctcggttcttggttgccatgctttaagacttaccttgcaggcaggcaaactaaattttttattttgcggaccaggaaaaccccggattatctccccttggggacaacctcccccaaggtacagaaaactcgggcacgagcactcgcgccctaaaaaataaaaccgttagaacagctgttcaccgtgctgcggacagcgaatcaggtagttaaaagcccctagggcagcgttagcgccggcacccagggcaatcacaatctgtttatgcggagtgttggtgcaatccccggcggcaaaaattcccggcaccgaagtggcaccctggttatttaccttgatatatccgtcttctaactgcatagtttccggtaaccagtcagtgttgggaatcgagccgatctgcacgaagatcccgtccaaatctaaagtttgcttctggtcactggcgtcagcgtactccagaccggtaacccgatggccgtcccccagcaccctagtggccttggcagaactgattaccttggtattaggtagcgtttccaagcgattgaccagcaccttatcggcctgcaactgatctgccaggtcaatcaaggtaacttcgcgagccaaagccgccaggtcaattgcggcctcgaccgctgagttgccgccacccatgactgctacccggcgatcggcaaacaacggaccgtcgcagtgaggacagaaagtgaccccccggttcaggtactgttcttcgccaggaatatccagacgcctaaaactggtaccgctacaaatcaccacggtacgcgcgcgcagacaagccccgccctcggtagtaagcggaatcattccgtccttatcgcgttccccaatggactcaacttggatcccgccaatctgttcaaccgcgtaatcacgcaggttagctttaaaagtggcgaccaaatcctcgggttgtacccgttcaagggtaattagattctcgatctgaccactctctaggatttgtcccccgatgcggtctgccaccaacccgactcgtaattgtttacgcgccgcatatactgctgcggcggtggcggcggggccgcccccgattaccagcacgtcgaagggttccagggcgttgaggcgttttgcccgcagaccggtcattccccgcccaatcttggaaacgatctgttctaaagttgccctgccctgcaggaatagttctccatccttcatcaccgtgggtacggattgcagatgcagatgctcgaactcttcccagaaagttcccccatccaccgtggtgtgtttgattaaggggttgagaactgaaatcgcgttcagggcttgcaccacgtccgggcagttcatgcaagaaagcgaaacataactggtgaactcggcgggttcatcgatttctttaatcgcggcgataatatcagcatcagccttcactggatgcccacccacctgcaataacgctaatacaaagctgttgaattcggttccggtcggcacccccgcgaaacgtacactaatatcggttcccacccgccgaatcgcaaaagaaggtttacgcttattttcttcccattttacctggatattgtcagataatcccgctatctgatgcaggatttcggaggtctgcttggactgttcggaataatccagggaagtcgcaaactctaccgggtatttaactaatccaataacttgttttacctggtcaagtattttctcttctagcattgcttatagctttccagacagatcaaacgtaggagtaatggtgctctcccccaaatcccagttcgcggggcacacctcgtcagggtgatcgtaaatatattgggccgcccgtactttccgcagcagttccccggcgctgcgtcctaccgcatccgaagtggtttctacatattgaataatcccgctggggtcaatcaggaaggtacagcgataggcgcacccggattcttcatccaaggctccaaacgctcgcgaaatcttgccggtagggtcggccaccatggggaaagaaattttttgaatccgtttcgaggttttatgccaagccttatgggaatgatgtttatcggtagaaaccgaataaacctctacccccatccgctgcagctgagcgtagttgtctgccaaatcctctagttcggtggggcaaacataggaaaaatccgccggatagaagaacattattgcccatttatcgcggtaatcctcgctggaaacatcgacaaaggagtcattatggaaagctatcccggaccagtccggcgctacagtattaatcttggacactgtcagcctttctgcatatataccatcgtaaaaacgcctaacactttccttctatggtaacagccgcccgccgccccggttagctaaatgcgctatccgggcaggtattttaaatagttatttccgattcgggcagcttctccacgttaatatctttgaaagagtaaacctttacccgattaacgaagcgggaaggccgataaatatcccatacccaggcatcttgtagggttacttcaaagaaaacatccccgccattattgtgcatttgcacgtcaacctgattggcgaggtagaagcggcgatcagtttccaccacgtatttgaagatagacaccacatctcggtattcgcgaaacaaggcgagttcctgatggttctcataggcttctaaatcttcaatacccaattttcatccccttagactgctaaaaactttgggaacttgcgttgcgctggtgcggcgagcgcgccaggctcggctaaattccgctgccggcactccctgcaaatgccagctgaggcggtgcaatgaatccagccctaactgcctaattgcctgggtgtgctgcgcggacgcatatcccttatttgctgcccagccataccccggatcgggcaagccgctcataagtctatcccgagtaaccttggccagcacggaggcagcggcgataactaccgatttcccatctcctttgaccaaagtggtaactccgcgggaaatttctttttctgaggacgcagtcgacaccgctgccggcgagggcggctcgcaggaggcaaataaatctgcaggtgccgttagatagtcgaaactgccgtcaagtagcagtaaacgcggagaaaaaccagttctttctatagcttccaaggcgcggaatgccgctaagcgcaaggccggggttaatccctcgcggtcgatttcttcggggctggcggttcctaccgcccaggcagccggccatgccgctaactcgtcgaacatggcttcgcgccgcttggcggttagctgtttcgaatcggttaaaccggcagggggcgccccttcgcttccatctatgaccgctacccccactgccaagggaccggcgattgccccgcgacctacttcgtcaatgccggctacgcaagttagtttagacgccgaagtgccgctcttacctgcagaaatagcggtgtaatccggggaggtaaatagtttttccgcgcgcgatagtaaggaaagttccaggtctcgacttgggatggttgtcattttagggagcaggcggaaccgctgcgaaagcgtcggtgttcttaatcgtagacatccgagtaatcggccacatgatagagaatgctcgcccggtcacctggtctactgacacgaaacctttcgaaggctctttcatatggaaacgcgaatcctccgagttggaacggttatcccccaacacccacagtttgcccgccggcacagtcacatcgaattttattaaagagggcgcgctgccggggttaatatatccgctttcgtctacgctgacgccattaacttttatccgcccattagtgtcgcagcattgcacccgatcccccggtagtccgacgattcgtttaaccaggtggttgtgggagtcatcggggcgcagccctacccaaatcatcatcttgccgaccagggagggactgggggtgttggcgccgcgttttagccagttttcatcatcttggaaaacaatcacgtcgcctcggttaagttgccggtatttaggaaccagttttgacacgatgatacggtcattgatttgcagagtttgttccatcgaggaggacgggatttggaaggcctgcaacaagaaagccttgataattgcggagatggctagggcaactaccaccatcattagggtttcccgaatcatcaaccaccatttggagggagtcttgcgtgtgcggcggccacttcctgaggcaggcccgtctgccgctcgtttccctaagccgcttgcggctctagtttctttcatccctttagctcccgccatgattcgatatttccatcatgccatatataagttaatcggctctgcccgcaggcagagccgattaacaaataacgattttaggaatcgcgacgctctttaatacgagcggctttcccatgacgttcacgcaggtagtacagtttcgcccggcgcacatcgccgcgggttactacctcgagagattcgatagtcggcgagtttaccgggaaggtacgttctaccccgatcccgaagctaattttacgcacggtgaaagtggcattcggctgtttcttgccgtgacgggagattacaaccccctggaacacctggatacgagtgtttccaccttcggtgacccgtacgtttactttaacggtgtcgccggcgcgaaaatcgggcagatcagagcgctgggacttctggttaatctcatcgatgatattcaatgtagtttcctcatttgctttcgttccgcaggtaacgtcagctatcgggccggtctagccggcgtatctagcattgccaagcggcatttgcggccccctgcggcaggtttcgcagcctacttgtgcaaccttgcctattgtgccacgttttgcgcccaagacggaacctggcgggctgtgaaatccctaaccgcgatcagatcctgattttcaattccgcccaccatgaaggtgcgacgcccgcatttgcggtagccgtggtggcgataaaattttagggctcgacggttggcctggttggtgcctaaaccaatcttggttatatgcgggaaaagtgcttgcagctgagcatgggatacttccaacattgcccctgccagtcccgagctgcgccagcgctgatccagatagcattttgacaggtaggcgcagttttctcccgctgcttgcaccaggttttcttcggggggtaaaaacccgggggcgcccgcgttgattaaggtgtaaccggcagtttcccacgaggtttcttctttgtttttttcgccgggagccacttcagccaagatgattaaagttcccggatcagctagataggctttaaaagcctgctcactaagttcttcagcgacaaaacgggcaatcgcgtcctcgggtaaatagtccgggcaagcctgtgggaataggcgagatgctatagctgagcaggttgccgcttctcccggctgcgcgcgacgaaaacgtacctgccggctatagggggcaggtaggaatccgtgggcagccaggatttcacgatccgatttttcgagggcgtccggggctaaatcccaaatcaaatcggggcgacgagcggcagttagcattagggactgctggcggcgccaatctttgaccttttggtgatccccactgagcaatactggcgggatttccaggtcgcgccaagtagccggctgagtataggcgggatattccagcagtccggatagttcataggattcttccaccagggaaccggggttacctacgaagccatccagcaaccggcaagttgcttctatcagggcaacggcggcgacttctcccccgtttagcacatagtcgcccagggaaaaaggtaacaccgcaacacctggctgctgctgatagtactggctgactcgctggtcgattccttcatagcgcccgcaggccaccaccagatgctcggcgttttccgctagatcccgtacctggcgttgagtgagtggaattcccgaaggggtggggatagccagcaccgttttagcggcacctgcctggtcaatcacctggtcaatggctttgccccacacatcgggtttcatcaccatccccgcgcccccgcccgcgggggcgcgatccacagtccgatgtacgtcttgggtccagtcccgcaaatcccatatatgggtttgcaaaataccgctgcctcgggctttacccataagagaaacatctaagcaatcaaagaactgggggaaaatcgagataatatctatccgcatgggggaacctttctgcacccttaaaacaatccgtcaggtgcatccacggtgattaccccattttcgaggtcaaccccggtcactaaggctttcacaaaaggtacttccactagttgatcctcagccgtggttacctgcaggcggtcttggaatccccccagagcaagtcccgcacatttacctaggggttcacccgcgggactaacgacttttagcccttctagctgcacagaagagtattcatcttcccgggaagtttccggggcaaaaagttcggtaccccggatagcttctgcgccctcacgcgtgtttatatgcgaaaaagtcaggcagtagcgattttttatttcccggtaggacgccactgtccattcctcacctgcagcggtagtcagggtggctcccacttggaaacgttcggcgggatagtcggtaaagggacgcaccagcacttcgccttttaggccacgcggcgggccaacctgcccgacttttaccagattcatagttctctttcctgttatataagttgcgagccccatgaatcctcatggggctcgcaactaaaaaactagcgctatcggcgcgaacgacgatccgtgtcgactacatcaacccgaaccggtccgcgagtagaaagtgcgcccataaccttgcgcagagcccgcgcggtgcgacctccgcgaccgattactcgcccaagatcctgcggattgacccgcacctctagcagcttgccgcgccgcatactgcgttcatccacccgcacatcgtcggggtgatcgacaattccactaactagatgttctagtgcatccgccaacatatttaggcttcctcactctcgggagcagcttcctcagcttcttcagccttggcttcttcagcttctttagctgccgcctcggcctcggccttagctttttcttcgcttaccttagccttgcgcttttgtgcctcgtccgcggcggccttcacgttcttttcgcgggcctcgtcgctgctaagagtttctttggtcttaatccagctttcaacgttttctttaccgttgaagcgggcaatatcgcccgaaagtaccagcaaccggcgaactgcgtccgagggctgtgcccccacgccgagccagtactgaacccgatccgactggacctgaataaaagacggttcctcgttggggttgtactgtccaacctcttcgattacgcgaccgtcgcgctttttgcgtccatccaccactacaatccggtacaccgggtagtgaatcttaccaacacgctttaaacgaatacgaactgccacttttgtggtttctcctgttctattgactgctgagtgtccgccctagccggtgggattcggcctggatcaaactctcgagacaaggccgccacacagagagggggtgtcttggcccggtacaactagctattctgccagaatttgaggctgtgtttctactttactgcccgctaggccggcttctttgagcagtttcacacctcttagctactctctgcgcgattccaggagcatcgccgcacaaaaggctgccgcccctaatcgctggactgactgcggtgaaaccgggagggagctactgaaaagcacgaataaactgttccacggcggcgcgggcagtaaccggatctaaatcgcgggcgctagccacaaacgccccgcgcaaatgttcgggatcttcccggttataacgggtttggaaagtttggacttgtcccccagccactcgcactaggtggatcccggcagccacatcccaggggcgcatcgcagttccaaaggcgacggcggtatgcccggcagctacctgtgccaggtccaaagccccggcaccgggagaatgcacggtcgcgtaagcattagccaggcgggcggccatctgccaggatttttctactcgctgcggatttttatcccggaaggggaaatacccggtgatgatgccttcgctttcggcgcgcgcattatcggcttgcatcgcggtggcgcgctccccctcataaagggtggcattggtagcatcagcgatgaaaagttcgcgagtgtagggaacataaacagcgcctgccaccgctttcccatctagctccaccccgatagaagtgttgaaataggcgacgccggaggcaaagttcgcggtgccatcaataggatctacaatccagcgcacccgcttccctaagtccttcactagcgcttttgcttccgccagttcgcctgcccccggggcctcctcgcgctggtcgtcacgagcctgctgccaggcgaactcctcagctgcaagtggctgctctaggcgatgccgtgatttttcctggcaagcagcgtggacctgttgcaaagttaaggctccggctgcggcaactttttctttctcgaggacgtgctccccggtttcctcccccaagatccgggagccgggtatcgcgctgcctagcaggtactgcagccgcgcctccacatagcggtcatggatagtgactggatcgtggataccggcttttaagaacacctctaggggcgcacgaaaggctttgcgcaggtagacccctacctgttgtgccgcctcccccgcgattatcattaacgcgtggtcaaggctcattcccgaagtgctcatagcttctattattaccctctttaggctattagtcctaggaaaccggggctttagtggcgaactcgcgccccagcaaggccactttttcaggtttaactgccatttccagatcgctactcggatctgaggaatagcgcaggtagtcggcgcgggctcccggttccagggcgcccacccctaggtagtcgcgggcgcgccaggtagcaaaatcaataatttcccgggcaggtatcccgccgcgttcccatagcgccagttcccgtcccaactctccatgcggttgatacccaccggaatcggtacccggcagcagctgcactccggcatcgtagagcatcgcaaaatgctcgcgccgcccttcccacattttccgcatagtttccgcatacaccggatatttctgacccgcctgcgccgcgaactgattaaacaattcaacctgcaacaaggtaggagtcaccggaatcccgcgccgggcgcactcttgagcctgctcggcatcaattccactgccatgctcaatacagtcgatccccgcttctagcagacccgcaatcgctttatgggaaaatgcgtgcgcggttacccgcgctcctgcctcatgagcagccgcaatcccctcctgcaagatttcggtgggccacaggggatccaaatctgaatccgcgccgttggagcggtcgatccagtcggccacgatttttacccatccgtcacttttttgcgcttggctcgccatcacctgcggtaaatcactcaggttctctacatcgataggtagcagccgcatatagcgtttagggcgagcaatatggcgtccacagcgaataatcggcggcaaagcagggttccctaaaataccgggagcatattccaggtttccgcagtcacgaatcgctaaaattccgcagtctcgatccgcctctgcctgcgctaaggcttcttgcggtgtggctatctgccctactgccgcgaaaccgatatggcaatgcacatcgcaaaatcccggcaggaaatagtcgccgtcagcggtggcgtcggctttaaaagttccgaagtgtccgtcctcggtaatcgttaactgcccccgcacccagctgggagcctgattagcttgcttacggtaataaaaatttccgctaagttgcttcatcgctgtcccagcattcgtttcaagtcatcgggcagatcatccaaagtgggagctgcggccggggcggctggctgcgcagctcccatcccgaaagcactgccgggagccggcgctgtttcctcgcctttagcggcttgttgtgcctcccactgtttttgcttcgcgggattgccgaacttgcggcgattcttcttccccgccctacgctgcttcttggtggcgcctccgcgccctccgggcatccccggcatagagggcatcccgggcatgcctcccccattagacatccgtttcatcattttcgcagcctgagtaaaccgctctaccagcccatttatctcggtaacggtggtgccggaaccgcgcgcgatccgggcgcggcgcgaaccgttcagcagggaaaggtcatcgcgttctgccggggtcatggagtttacaatggcttcaatccggtcgatgctcttttcgtcaaaggcatccaactggtcgcggtactgattcatgccgggcagcattcccatcagtttcttcatcgaccccattttgcggagctgctgcagctgcgccataaagtcggtgagggtgaactgccctttctgcatcttccgagccagcgcctcggcttctttttggtcataggccttttgcgcctgctcaatcagggtgagcatatcacccatatcgaggatgcgcccggccatccgttcggcatggaaacgctcaaaatcacccaagttttcgccggtagaagcgaacaagatcggttgcccggttaccccgcgcaccgaaagcgccgccccgccgcgggcatcaccgtcaagtttagagagcactaccccggtaaagcccaccccgtcacggaaggcaatcgaagtttgcactgcgtcctgccccaccatggcgtccaggacaaataggatctcgttaggattaaccgcatcgcgaatatcgcgcgcctggcgcatcatttcttcatcgacaccgagccgaccagcggtatcgacgataatcacgtcatagccttcggcgattgcccggtttagtcccgaacgtgctacctcgaccggatcgccctttccgtccccggattcgggagcgtgaatatctactccggccttttcggcaacaatacttagctgagtgaccgcgcccggacgctgcaggtcacaggcagcgaggaggacgcgtttgccttcttcttctcgcagccacttgccgagttttccggccagagtagttttaccggcaccttggagaccagccagcatgaaaactgatggtccgcgcttagcgtagttaagttcccgggtctcgccccccaagacctccaccagttcgtcatgaacaatcttgactacctgttggccgggatttagggctttggaacgcgccgctccataagcttgttgccgcaccgtcttggtgaattggcggactaccggcagcgctacgtcggcttctagcagggcacggcggatttcggagacggtagcgtcaacatccgcctcggtcagcaagcctttagagcgcagacgcttaaaggaatcggctaggcgatcagacaggctattgaacaaagtggtttcctcctggaaatagtttcgccgtctagtttacttcagcagcgcatctacgaaatcttcgggtacgaaaggcgccaaatcatcggggccttcccctagtcccactagcttaaccggcactgctagttcgcgttgcacactaaccacaattccgccccgagccgtcccgtcgagcttggtgagcacaataccgctaacatctaccacttcggagaatacttttgcctgttgcatcccgttttggccggtagtggcatctagaactaacagggtctcggtcaccggggcgctcttttcgattacccgtttgaccttgcccaactcgtccatcaaaccggctttattctgtagacgtcccgcggtgtctaccagcaccacatctagccctttatctttggcatatttaaccgtatcaaaagctaccgaggccggatcggcgccctctttatcggagcgcactacttccactcctacccggttaccccaggtctctagctggtcagcagcggctgcccggaacgtatcggccgctcccagcactacggatttgttttccgccaccaaaatgcgggcaatcttgcctacagtggtggttttcccggtgccatttactcccacggcgaggacgatccccggttttttgccatcggcctgctctaggtttaggctgcgatccaaatccgggtttaccagctcaatcagtttcgcacgcaaaatttctcgaatcttatccggatcggaagtccccagcactttcgcctgggtacgcagttcctccatcagctcatcggtggcggcgatccctaagtctgccagcagcaaagtatcttctatttcttcccaatcttctgcgctcaggtcgccgcgaccgagcactcccagcagcattttgccgaatgatcctgatttcgccagccgggaacgcagacgctgcatccgtccttgggctggttctggggtttcgagggcggcctcagtactttccggttctggttctaccggatgggcttcttccgcgatgggagcttcgcttggctcttcggcgggttcggcggattctgccgcgactggcgtttcttccgctgctactgattccggcgctgcctgctccggctccgcaacctccggctccgcaatcgcggtctctgggactgcctctttcgcaccctctttatcagcggtttcactttctttagccggttcagctgctgtaggttccgctcccccatctacgggagtttcttcctccccacccgcttcactgggagtcgcttccagttgtttcgctttggagggctctagccgtttcttcgctttcgcagagcgcaccgccaaagcgctaccggttccaacgaccgccagaactagaactacaactacaatcccgagaggtgtaaaaagaaaatccatatccctattgtcacctatcggcgcgcccaggtcatattaggaaaagtttttcccgcgtgaactgccggtttagaaaaaatatcggtcttattccgatttgaggggttgccaggaaaccttatccacctggaaaggttcatctccgggcaaaccggtgtgctcctctaaatccagttcggcggcgtccgacttcaccggggtgtcgggggtgaacttgcgagcccagcgacgcatctgcccgccctggtggtcttttggcttgtccgcacggggcgtatctgcaatcttttggattccagcagcttttcccttggttttattggcatttaccgtcggtacctgcggcaggtagctagtggaatcttctggatctttcaccattggggttgcggcactagctggaggacgccgatgctgcgaaggagcaaaagtgggaggcagcatccccgtgtcatccggtgaagctcccttagcgttggcttttgctcgtttttcttgacgcgcggcatctttttctgcccggcgcgtgcgcatcgctgctacttcttccccccacatttgtccggcggccgtacgcaggttctctacctctgccagcggattggcggaatctcccggagatgcctcttgtagcaaagtgtcgaggcgtacccgctgaccagagtgttcccggggggcgcgatgctcgttttcttgccaagaatcggctgactcgcggatccattcccgcaccccacctccgggacggcgggtgcgcaccattactgccaccactagcaccccaataagcacagtgatgccgatgcccacgaatagcaagatcaacggttgagtcacgtaatctagtatgccaattcttaagcgatttaccgactttagatattgaccgataccaaactgttaccagatttcggtgtgagcttagctattagccggctctaggcgttgcgaaattacccgcgatactccctcacgcatagtaaccccgtagagcacatcagctacttccatagttcgtttttggtgggtaatcacaatcatctggctaacttcgcgcagctgtttgaacagctctaacatccgtgaaagattcaaatcgtccagggcggcttcaacctcgtccaaaatatagaagggcgaggggcgggctttgaaaatcgcgattaggaatgccaacgccgctagggaacgctccccaccagagagcagggataggcgttgcacgttttttccggcgggccgggcatttatttccaccccggtagtgagcatatcttccgggtcagtcagtttcagagaaccgctgccccctgggaacaggtgggaaaacacttccgtaaactcccgggcaatatccgagtacgcctgttcaaaggcttctttcacctggtgatcgacttcccgcaccactaccagtagatctgctttcgaagtccgcagatctgtcagctgtcccattaagaactcaaagcgtttttcgagggcgtggtgttcttctaaagctaagggattaactttccccagccgggaaatagcgcgattcgctttttccagcagggcgctctgttcagcacgatcataggggtgccagcctccttcctcaggttctgctgcgctttccccgctgacagtttcagtttttacctgcgcttgctcggcgtttgctacttcatcggtttttggcgtttccgtatcctgtccttcatctgcagaggtagcagcttcttcctgggcgttttctgcccgctgcgccagcagctgcggatcgggaaccagctgctggggaccaaaagcggcaattagttcttggggagaaagcgcgtaacgctcctgcgcttgctgagttaattgttcggcgcgtacccggtattcagcggcagccacctcgtcgcgacggcttaaatcgtttagctctgcaagctgggtattcaaacggtctatttcactgcgtacttgcccggcggcctgtgaggaggcggcgcgggcggcctctgcgctttcccgccaagttttcgccacctgggctacgctggccgaacgctgcgcaaacacttcacaccaggacgccacctgcagcattctttgggaatcccgggcacgctcgatttcccgttgactgcgggcagctagccgcaattggaaccgttccaaagactttacttccccttgaaaacgttcccgcaaattattggtgatctgggtagcggccgccagctccaagtgcgcctgcgcagctttttctcgagccgctaaatcggcggcccgagcggtctctaaaacttgttctgcctgctgcaaaggagctaaatcctcgctgcccgcaaaagcatcccgcgctttttgagccgccgctaactgctccctgcagttttcaaaatctactttcgcctgcgccagctctgctgccgcccgcttttcttggctctcggctccgctaactgctgcttggctcagtgcccgttcttgcgcctgcgccgccgcctgagcatcggactggcgcaatactttcaatgcctgcgccgatgccgccgctgcctgcgataattcttctgtagctactttcacctgggcacgcgctttttctgtagcttctgcggcctcctgagcggctttccgggctaagcgtagacgccgctccacctcgatacggttaactccaccgctgccggtttcccccaggtatttgccgataatcgtaccgtctttgatccccacccgcgcctgcggattatctgcgagcagtgcctgcgcctgcgccagattttcagctaaataactatcttttagcagctcgtttaatgccgggtgtagcccagtaggagccgagattacctctcgagccggaatcggttcccccgagctgttcgcggccggcttgctcagaggaacggccgcgtcctctggattacctaccacccaactaacgctgccactgcggtctttaacggccgccagccccgcctctagctgggctgcttcaatggtgagggcggatccggcgcgcccgagcaaggcggcaattgccccctcccagcaatcgggaaccgtgattaaggaggctaactgtccccgcgacttcgctgcctgcgcaaaagtattttcagcctggttcgaggaggcggctaacaccccactgaggcttgcttcgctctcggaggcggccactgctttggcttcgctttcgcgcagacggtcgcgagctttctctaattgcgtgcgtacctggttttccgcctcggatagtttccggtagctacccgccgcatccaccccggattctggaactgtttctcctgaagcttgttgtttttcccgcgctgcctccaatttttcttgcgcatccgtctgcgctttttgggctctttgaatccgggaatccgctgcctccaggcgcgccttggccgtttcaacttcccgctctagccgcgcggtcttctgggttttttgctgtgcctcttcccgcaactcctgggtaatgcgaacctgctccccaactttccgagtggtttcttcccgggcggcttcggcggcatcagcttgcttgcgtttagctaaagtgtcctcgtcatgactggccagttcgctttgtaaatgtgccaactggctctggcgttcctctacgctggggccggcgggaactggttcaggtttcgctaaggaggaggcgcgttcattggctagggcttctagggcacgcaggcgctcggtgatcgcggtcaactgttgccacagattggtggctttacccgctacatcggtttgcgtcgcatctgcggttaatttctgcagtttttcctgctgcagagcaagtttctcccccagttcttcgcgcctagttgccagggctttcccgctttctttatagcgggaaagctgcaggctcatctgctggaggtcatctgccagaatccggcacccggcatcgcgcgcctgtgcctgtaacaccgcagctcgccgcgcagtttttgcttgccgcgctagaggccctagttgcctttgaatctcttgggtaaggtcggaaagccgggaaagtttttcttctaaaccatcgagtttccgcagagcgcgttctttacgccgctgatgttttagcaccccggcggcctcttcaatcagggagcgccgctgggaagggtcggcagaaagtacctggtcgagttgaccctgcccgataatcacgtgcatattgcgccccatgccggtatcggaaagcaactcttgaatatctagcagccggcagggagtgccgttaatggcatattcggaaccgccctggcgaaacagggtgcgggaaatggtgacttccgaatagtcaatcggtaaatctccgctggtgttatcaatggtcagcgctacttctgcgcgtcctagggagctgcgggaactggtgccggcaaaaataacatctgccatggagccgccacgcagattcttggcaccctgctcgcccataacccaggcgagtgcgtctacgatattggatttgccagaaccattcggaccgacaacacagatgattcccggggtgaactgcaaagtggtggcgctggcgaaagatttaaatcctcgcagcgccagcgactttacatacatctagattctctcgctattcgcaggcgtccgggaaccagatttttatttcacggacagccgcgctgggcgaatctgaagcgtgcaccaggttttggatttgtccactgtcgtagtcgcgtccataatcgccgcgaatagttcccggcgctgcctcggtggggctggtggcacccaccagggagcgtaccccctcaactacccgggtgccttcaataactgcagccacaatcttcccggactgcataaagtcaaccacggattcaaagaaatgtttaccgcgatgctcttgatagtgttcatacaaatcatcatcgcttgcctgcactacccgcaaagcgtcgatagcgtagcctttttgctcaatccgcgccaagattttcccagtcagcccgcggtgatagccatccggcttcaccagcaccagggtgtattccttatctggatccaacttgaagtcactcattcccgtttcctttctcgctttcccgccccgttaagcccaaaaacttaccgagtttacttttaagaataccggttgcggacgcatcccaattctttttctgcgcttcacagattttacgggagtcgctaaatcattccccaggctggattgcatcctctgcttcgggcgccgttagtgccgcctctaccgcgtctaaggctttaagggattccccgccttcggcggcaatccgcagttcatccccgggttttatcttcaaccccataagcgcgaggacgctgcccgcatcaacctggttaatggtcacctgggcatcaaaaccagtagcaatccgagctaaacgcgctgctggacgcgccgacagtggctctgaagccccataggtgatagtgcggggagcaagcggatccggagcgggcggaggtggcaaaatatctgccgcatcctcttcggggtaaaactgggaggcagcattgattgatcgcaggatttctgccaggtctgcgccttgagcggcggccactactcccgcagcggttccctccacaatcgggccgcgccctagccgcagccggcgcatcccgatatcggtgattacctgttggcaggctagccgcgcagccccaaaatctgccattaagacaatcgcgtcttgttctccgagtttttccattactttggaaatttttccgctcaggatttcagcggcggtacccagcccttcatcatggcaaccgcagggctcgataatcacttttggagccaggttggctaccacttcgcatattccccgcgccagcgtttgtgactgcgaaacaacaataaaggcagtttgcggttgcatagcatttcctccaaatacagatgtcccctctaggctatcgcgccacggggcacgacttaaacctagaggggacatctacttttcggttttaagcggatttttccgcacgcagggttgagaacccctattcggcgtctaaatccttttcgaccagttctgcaatcgccgcgacagcatcctcgttttcactctccacggtaacctcggcaccgcattcggcacccaaggtcatgatcagcatcatcgaggaggcatctaccggttcttcttcggcggttccaatagtgatttcctcatcgaactcggcggctttttccgcgataatcgaggccgggcgggcatgcaatcccacggaagatcctactttcacagtttttgaagccatgatttttcctttccttatttaactaatgtatctaacttaggctttgactgctgccggtttcttgcggcgcatcttagcgaaagtgaccgcggccgcagccactgccaccccagctaccagggcgactagcgccccgaaaatattggtgtaggcaaatagcacgaagattcccccatgcggagcccgacacccaacccctagcgccatcgcaattgcgccggtcaccgcgccgcctgccatcatagaggggattacccgcagggggtcggctgcggcgaagggaatcgcgccttcagaaataaaggacagtcccagtagccaagcggctttaccgttttgctgttctgccggcgaatacagtttcggacgcaccgtagaagacagcgccatcgccaggggcggtaccattccggccagcatcactgctgccatgaactgataggacccatcggtagcttgcgataggccggccgtacctaccagataggcggccttattgaccggtccgcccaggtcgaagcacatcatcagaccaataatgatccccaacaagatcgccgaggtaccggccatagagttcagccagttctgtaagccgctcatcaaggctgccagggggcgaccgagcagcagtagcattaatagccccattagcagggtggttagcagtggcacaatcgccaccggcatcagtcctgctagccaacgcggacatttcagagtggagagagcattagcaataatcccggccagaatcccggtcaccaggccgccgataaatccggctcccagggttaccgaaatcgcgcctccaatgaagccaggggcgatgccgggacgtcctgccagaccgaaggaaatatatccagacagcgctggcaccaagaaactcattcccgtttgccccaggaagaccaacagggctcccaggtaaagcaacaatccggagcggttagtcattattttggcttccccgaaggggccagaatctggcagattccacagcgagaagttaagggagatatcttgcgccgggccggccacatcataaccgcccagcaggaatcccaaagcgattagcaaaccgccggctgctacgaagggaatcatataggaaaccccggccatcactgccttttggattcgccgtgcccaacctactttctcttccggctgcgcatcgctagtagtggctaccggagccgcattcgggtctttctttttcgtcattacctcccgaattagcttttcgggatcgttaatggccgcttttactcccacatccactatcgggagatgagaaaaacgttccggtgcctgcacactaacgtcgtgtgcaaatatcgccccggaggcgcaggcaatcaaagccgggtctagccggtcgatatgcccggatccctgtgcctccacatgtacgggaatccccagttctttgcctttgttaagcagcgaatctgccgccatataggtgtgggcaatccctgtgggacaagaagtcaccgctaccaggtatttcccttggtcaccgctggatcccgcttccggttttaccggagctaccggggctgtaggaggattcgccggagcttccttagccgcgggcgcactcttggaggcagctgccgaaccgggctcgaccacctccataatgatctctgcgacctggtcggcagaatccgccgaacgtaaagtagccaggaagttcttatccaccagtttgcgtgccagcttttgcagcagtttcaaatgtgcctgtccttgcccttcggcagcagcaatcatgaaaatcaaatctgccgggccgtctttggctccaaaatctaccggctgtgccagccgggcaaatgccaagctgccaactttaactgcctgcgagcggcaatgcggaatcgcgattcccccgggcatcccggtcacggatttagcctcccgcgccatcaggtcgctaattaaaccattttgttcagcgcgcccggtgagtgcgattttcgcagctagagccgcgattacgttatctttatctgtccccagcggctcatctaggctcaccagctgcgggattatcaacttttcgtcttccatagttctcctgttcaaggtcgctgttaaaggctaagtttggttattttggcttcttcgggatggatttctgcgggggtaggcggctgggttcccactttcgcgcaggcagctgccccataggcgagcgcagtcgctaggcattcttctgagctcttccctcggctttgagcaagtacatatccggtgagggaagaatctccggctcccacggtggaacgcacccgcacatcggggctggttccatgccaggcgccctcttcagtaatcaaaatggcaccggccggccccagggtagccagcactgccccgactccccgttcgctaagttctttggctttacgcgctactggcagtaaatctccgctgatagccgccctttccatttcggatccgtttcctcccaaaagctcagctagctcaaaagagttgggtttcatcaggtcaacttttacctggccgagcgctttccccagggcgcgcagcggctgcccggaggtatcgactgcgaaccgcccctggcagctagctagttcttgtaggcaggtcacgtaaaaatcatccggcaaccccgggggcaaggatccagcgagtaccacccagtcactatcctcgagggttcccgtctgttccctgagtgctgtcagcagcaatttttcttgctccacatcgagagtggggccgggttcgttgattttggtggtttccccactggcgtcgataaccgtgaggttagtgcgtactgcttccggaatttcggtgcacacataggggaggtctacctggtctaacagctccagaatcggatcttgggtttttgccggcaacacgcagcgaaccgggaaaccggcctcttgggctacccgcgccacattgattcccttcccgcccagatcggtgtgggtagagatgatgcggtggacacctcccggcaccagggtctgctccaagttcacggttttatccaaactggagttcgcggacagggtaacgatcatgccaagaacacttctttcgctagttttcctaagtctttgccggcaatttcactcagacgctgatccgaaatcagcatttcaatttcaccgggagcagcaaactggacgataccggtgtggccatatttatctgcatccgccagcactaccgcgtgacgactgctctgcaccattgcccgttttaccgcagcttcctcgatatcaggggtggtataaccatcgagcggatccatcccgtttgtacccaagaaagtgatatccgggtggagggcgcgcacggcctgcaccgtgaccgccccgactgtcgccagggtggactcgcgcactgtccctccgattagatgtactttcaggctgcgggtgcgggtggcaacagccgctgcaatcgccgccgagttagtcaccagtagtaaatcggcgcggtcagggagcagctctgcaaaataggcggtcgaggagccggcatccaggaagacagtaaacgcgccctcgggaatgtggctgagggcgagctgcgccatttttcttttttcttcgccgttgactttcatccgctcggacaattgcgactcggggatctgttggatgccgactgctcccccgtaaacccgcttcgctttgccctggtcggacaataattctaggtcgcggcgaatagtttcatcggaaacttcaaaccgctgcgctaactcgcgcagactcacctgcccgaactcagatagcgcttgctcgatgaggaggcggcggcctccgctatgaaccggcatcttcgcctcccgtcttgctgtaagaatggaacctggtagatagagaatcaccagagccgttggtcaatactctactcaacataacctgcaacttcaagagattctgtgagtttagcgagagagtttgtggggttatgagattatttcgctgtttactatggaggtttagagtatttccttgtttaactttccaaaagatgcgacactggcactataaagttgccctcagtgaggaggaaaaatgtccgcagaagaaacaatctatggcactccagtggttaatggtctagcctacgggccagtcgcctgggttagccgttttgaaatccccaaactgcctgccacgaaaatcccgctagatgagcgggaggctgaagccgagcgctacactcaagcggctcagaccgtatccggacgcctgctggctcgctctaaagaaaccgtaggcagcgccgcggatgttttggccgcccaagcggaactttctcgcgaccccggtttcaagaaaatggtggtcacagccataaacaaaggcaccccagccgccactgccgtgatgaccaccaccgaaatgttctgctctatgtttgaaaaggccggcgggttgatggccgaacgcaccactgacctgaacgatctttgcttgcgagtggtagccgaactgctaggagaacccgaaccgggactgccccatctggctgagccttcggtacttttcgccgatgatctagctccggccgacaccgccggattgaacccggcagaaatcttggctttggttaccgaacagggcggccccacctcccacacttcgattattgctcgccagctggggattccctgtattgtagcggcacgtaaactgcaccagatcgagcaaggggaacaggtctttgtagacgcctccctggggacgattaccactggagctgacccggatgaagccctcccgaaagttgaggctgatctgcgcgctcgcgaagctatccgtaactggtcggggccagcccggcttgccagtggcgaggatgtggaactgttagccaatgttcaagatggtcccggcgctcagaaagccgccaccggatatgcgcaaggggtgggtctgttccgtaccgagctctgtttcttagattcggcgaaagaacctactactgaacaacaggcagagatatattcacaggtgctggcggctttcccggacaagaaagtggttactcgcaccttggatgccggatcggataaaccgatttcttgggcaactttggatgaagaacctaaccccgccctgggggtgcgagggctgcgcaccaccggcattgacgaagatctattcatccgacagttagatgcgattgcgcaggcagctcagagtcatcaagggaaaaactgggtgatggtgccgatggtttctaccttgtccgaggcaaagtgggtggcaaagctgattcacgaccggggccttactgccggaatcatggtggaagtgccggcagtcgcgattatgattgaccagttcttagccgaggttgatttcgtttctatcggcactaatgacctcacccaatatgtgatggcggcagatcggatgaacgctaatctggccacctataccgattcctggcagccagcagttttgactttgatttcccgggtagctgacgccggggtgcgcctgggtaaaccggtaggggtttgtggggaggctgcggctgaccccattttggcctgcgtcctgattggtatgggggtcacttccctgtcgatggctgcttcggcgattcccggagtgggtgcccagctagaacaagtgactaaagaacagtgtgaaaacgcggcgaaagagattttgacggctcaagatagcggagatgcccggactaaagcccgccgcgccctggggattgatcgctagtttagtacccggcgggggcagtaccgatagacaggtattgcccctcacccaggtcgacaatatcgcctgcttgcagcactaccggatctgcgggttcaatcgggtagacttgcccatctcgacgtaaccgggtgccgtttaccgactctaaatctttcaaagacgggttaccgtgctcgtcaatatagagcaggcagtgggtgcgggaaatctgtttagccgggctaggcacagtcatggtttgggcttgcggataggtggaggtggcggcatcaggccggcgccccactacaatcgcgtcctctaaaatcatggactgcccctgcccggaagtgaccgtataacgcatagcaggttggtaagcaggctgttcctcgtattgaggctgcatctcgtattgtccctgcccatagtcggcttgcccatactgttgctggtattggggttgctcataggcgggctgttgatacccgggttctgcataggggggctgctggtaggcaggttgcccatattctggttgttgatattcgggctgcccgtactcaggttgctgatatccgggagctccctggggagaatagcccggatattggggagcttgcggttgttcgccatagggattggggtaagcgggatttgccccctgaccataggggtcgggatttcccggcacgggcgcaccgggctccgcttggggggctccatagatcccgctgggcggatagcctgcactggcactacccgactggttcggatagtactggtagggatcgttgctcatagtgtttcctccattaccaaccggcaattttgtgctctcctatttacaccagtctaccccaggcgaggtttttccatctatgctcaccgcaaaaacttttacgcaccatttcccgccttgaggcttaaggctgattttcggttcggtgaccgtatgactgcccgcgtccttgccatcttgggtcacttgcacctggtaagaggcgggggtatcgccctcgcccggtttccaagttagcgctatttgcccatctgcagcgggttttccttccaaggcagtgactgcagatacttccgtcacgatgccatcatctgcggaggcagtaattagcggttcgctggaactgggagcgcttttaaccgagctagtatcggatttgaaatagtaggcaaccccggcaccagttccagctaccagtacaaacgctccgattagagccaggaggattcgccgccaacccaagcgggaagccggtaagagggaacgcgaaagcgccacgctagagtgtccccctacaatcaggggactatctgcccgcgccgcatctgccgaatctagcgctggctgcgaaccagacgcatctttaaggcgagtcgcatccggatcggtagacacttgcgccaaagtaggattagcgctcgcaatatccatgctggtcaccggctggtttagctgagcctgcacttcctgtaacacttgcccaaattgggcggcacttgcgggacgatccgctggatctggctgcagcgcccagaccagaatttcgcgtagcggcggaatcaactggggagcatctaggcggggagccgtatgtaaaatccgctcggtcagcgcagataccgagttatcgccgccaggaatttcgaagggactacgcccagtaaccagcgaatgcatagttgccgctagggaataaatatcactagccgctcccgccaaagagttttcatcgtgctgttccgggggtgcccagggtactgaaagtcctaaaacatcacggtgagctagtggctttcccagtggtaaagctagaccaaagtcagagagtaccggggtggaaaattcagagatcagcacgtttgccggtttcatgtcgcggtgagcgagccctgcccgatgtatagtttctaaggctcccgccagacgtatggtgatgtccagcgcctctttgaggggcagggggctgcggcgaacccgctgcgacaagttcgtcaccggacagtattgcaacactagataggggcgaccatcgggcagttttccggtttgatacagagacagaatcgccgggtgcgcgcaggtagctgccagggcatcggcctcggtagtaaaaacttggcgcccttcccggctgcccagctcccgcaggactttaaccgctactttgcgttcaggacgtttttgcctatagaggtaaacatcggcgaatccccctctgcccagcaaagactgcacactgaaacccggaattttagggggtgtctgcgccatggtcaccccctttccgtaagcgagtttcgtcaacgctcgggggcgtagctgcccggcgagtgtaatctagcagatcctgatttcctccggggttgttctgcggaggttgtggcggcggagggagcggggaaactgccggctttcctaagcgagtagcgtcccagtccccctcggaaggtgcccctggcgaagcctttggcggccgcggaggctgggttgatcccggcgggagcggaggttgtggcggcggcgggagcgaggaaaccgccggctttcctaagcgagtagcgtcccagtcaccctcagaaggcacccccggcgccggcgaaggctcgggtggcgttggcgctttcggaggctctggcggcagcggagattgctgcgaattccgcacccgggtaacttccgctgcttcactggctttatccgactccccctcgggtgccggctcctcccctaatttccaggcaatcgttcctaagcgagtagcatccgctgccggttcttcctcggaggatcccagcggctttgccagacgggtgccgtcactaaaatctatccctacctgcggtaatcctactttacctagacgggtagcttctgagaacaccccgcctgcagcggccggaaccggtgcggcttcactgcgcaccggagctaagggcgtacgcagctgccggtattcctgctgggtaagccccaaggacaaactgggcagcgaaatctccttacgcggggtcagaatcttctccacccccggaattacagtgagcttttgggcgaactcactgcgaataaagcggctatacagagaggaagggcgaatcgcggccaccattgcttttgctttaccggcggccgctttccaggtgtcggttagctgtttcaccagatcccatgcccaatcggaatcaatttcgctatcgagaccgggactgtaatccaggtagtcagcgattccggctagttcgcgcgctcctgattctgccttcgcttgttttattccccctaggtaagtatcgattatccaggcggcttcttgacgggtagctcctgccgggagtcgtaccccgcggtcacggaaacgatctactatttcctcccaggctccccgcaaacgcttacctggttctttggctttccgcctcctgcgcgtgcggtaccacttagccagtagcactagcaggatcggcgaaagtagcagcagcaaccaggaaccatattttgcggccaccgcgagcgctgccaaaatctgcataccggtggagggattatcagcgtgcgcctgcttttctacgtgcggcaaaaccggcggagtggccggtggtggcgggggctgcaatacctgtggtttaggcacggatttgggttgcggctgatcggtgcggggtacccgatttcggggaggcgtgggatcgaagggtacccaacctacgtctttaaacttcacttctacccaggcgtgaacgttatcgccctttagtgtcaggtttccgccagctttcttatcggccggataggcgcccatcactactcgtgcaggtgccccgaatgccctcaccatcagcgccatagctaccgcgtattgttcatcgtcaccgattaattctttcccttggaaaaattggctcatccgggaggcgcgatgtccggggcgagacagcccatccgagccatcggaaaagaaaccctcgccggacaaataagactccacattgcgaaccttttgcaaaggggtagttgcccgcgcggttaactggttatttagttcggtaatttcagtgggaactgcctcgtctttaccttggggaatggggtcaaactccagtcccgaaatccgcgagtcactggggatccgatccctggcaaacccaacctggtaggacaggttagcaggcgcagcagcgaaggccgaccgcagcgaggtcgaatagtaaataactggttttggctgattattgacttttagggaataggcatcgcccaagagcggcacccagggttggtcatagttcaccagttttatgtgcgcggtgctatcagctgaaacctgtttatctaataccgaatcaacctgcacaaattgcgcgtttagttgggggtcaattttgaagaccgtgccgtcataggcgttcatagtggcaaaacgcatccgggtacccgccggatagttcttgacctccgcgatggttttatctttccagtcgcgggaaagatgcctaaaggaggctaggggggaaataaagtcttctagttctactggcggtagtacgtgggtgcggagcacttcccggttgccgcgttcagttatcgccgccaaagaagcggaggccaggcagataactaccgtcacggataccatcgctagggggcgggtaatactgcttttctgcctggcatccgctaggttaacccggcgggtacgtgccttggtagcagaaccggtaactagggcgcaccaaagtagggctaccaggaaatatccggctcctgcccaacgcgccgctggaaccacttgggctccccaagcaatcgctaccaccaggctaatcgtggcaggtaccagcgccacccaggggcgacgcgaagccgctgctaagcccgctagtagggcggttacgaggcaagtaattaggggcagtactgctgctcccccagacggggttagcggcagcgcggcggttagggcgtcgcgccagcaggtcaccgtggaggtcaccaatacttggagaccggataaggtggggtaaaacttgcgtcccagcgggtcagtagcagccaaggtggggccgaaggctaaaaatacccccagcatcagggtcacagtgtagattattcccaggttccagcggcgaaccactaacgcgatcagcacccccaggacagtgcctccgatagcggcgattcccccggcgaaacctaggaaaggtagggcaaatagccagcaaggaatgatgaataagcatagggagcttaagcagattaaatcggatcttttcatgcctgactcgccccgcttaatgctcggggcagctgcgtgagttccccgatgtttagtagtcgccgcgaggtagcgcctcgccgagtcaaagtagctccggcatctgcccgcacaccggtggtagccatatcggcaggaggcagcaaacagatttgttgcaggcggcgcatagatactcccggtccgcagatcagggaacaaaccgaggcctgcgcctcatgggcaagcgcccagcgcaccagatgccgatactcttgggcgtcctcttcgggctgaacttcggtaagaaagtccaatactgcccgggaagtggccgctttcaacacggttttgcctgcatatagggtcaagggctgcccgctggacagggaggaaaccgctagagaggccgccgcctctaccgcgagttcaaaatcagcttccccataattttcgcgtttcagatccagcacaactaaatggtgggagcggcgagtctctaggtattgccgcatcattaactggccagtgtgagctgacattttccagtgaatatggcggcggtcatcgccgctctcataggggcgcaaggcgtgaaaggcagcatcggaactggttattacctgcgaggttgccccctccatatctcgagcatagccacttaaagttcccagcgcggaggtgaagttggggtacacatagacctcttgaaagtctggccaagaacgcacccggcggattaaccctaaaatatcttcacgcaccgtgcggggcggccccactacaatcttttcccgccgcctagtttgcaactggaaatctcggctaaaactcttatccgaacgcaaagtcggcagggcaatatcggcttgttccctccccaggggtaactctattttgagggcgcgcaccgcgcggcgtccattatttttagcggttgcccgtccgattagatcttgtccttttcgcagccggtcttgctctacccgcacccgcaccgagaggtctcccccaccccaggtttgcgctaccgcggctaccagcgctaatagggaggcaaacatcactgcgccggcctctgcccaatcccaaagcacccaggcagccaggctggcgagccctcctagcaggactagccaccctaaaccggtaagcggaatattgcgtagcgcacccaggtaaggagtggtgcgcgcccgtttccaggctttatttccgcttttcagcgcgctctttagcgcggtggtggtggtttcgggaactttcattattttaggcctgcgaatccactggcggtggtacctcgttgagcgccctctcgactacgctttgcgcggtcgctccttcaaagagggcatcggcatccataatgatcctatgcgaccaaactggcactgccagggtctttatatcgtctggtaatacgtagtgacgtccttgggaagccgcccacactttcgccatccgcatcatcccgatggccgcccgggtagaaacccccaggttaacggcatcatcttcacgggtggcttccgcgagctgctgtacataccgggtgatttggtcatctacatagttacgtagccccagctcccccaagacattaatttcttccgcctctaccaccgcggttaaatccttggagaggtcgggttgagatgctcccgacaaaatcttcaccgtggtttcccgatcgggataccccagagaaactttaatcaagaagcggtctagctgtgcttcgggaagtttataggtgcctgcctgttctaccgggttctgggtggcgattaccaggaatggcgaatctaccggatgtaccaccccatccacgctgacctggcgttcttccattacttctagcagcgccgattgggttttagggctggcacggttgatttcatctgcgagtacaatattggcgaaaatcgggccggcatggaaatcccactgcttagttttctggtcatagacggttaccccggtgatgtcggtgggtaacatgtcgggcgtgaactgaatccggctgtgcgaggcggctaccgaggcggcgagggcgcgcgccagggcagttttcccagttccgggggcatcctctaaaagtacgtgtccgcctgccaagaaggccgcgagtaccaggcgcacctggtgtcctttaccgagtatcgcctgatcaacgttttcggcgatctgcgcgaaacgagtggaaaaatcggcggcttctgcctgtttaaggatcatagagctatctgcctttcggtttgccgggcaggtaactcccgcccgctatgactgggattgtggttctgatagttgcttagggcgccccacctgatttgagtaaccgggttgcgccaaagagggcggttatcactgggtaaagtcggctgctctaccagcgggatcagctgcgggtatagcggtttcgacaccggaatcataggattgagattcaaccaattgttcaggtaggaaacagatgacattgattcatcatcggaaggatcagtaggggtagggctggaatcggggattgaaataactatctgcttttcatctatggaggtgccgccagatttgaactttagtgtcgcagtaatcgtccattcatcaccgggtttcaaatacttcaggctaataacccaaccgctcccacggatggcacccactttgtattgagagcttataagtggttttctgctaccgctttctaccccagaaactttcaaatctaagtatttgtcgatatcccacgcgtctaggttgctcccgtccacggttatcgtcgcgctagtacccttttggtctgtcagacgcatatcggtgatagacggattttcctgggcagctagattcgcggtcactgaatcagaaacacccccattatggtcaaaactacaggtgtattcgactttcagatcgttttgcgcctgcgggttatcgaatgggaaagctccgtcgtttcctaccgattttcccgcaacccgggtggctttgcagcttccgctatctccggcgggggcaactgctccactcagattcactttggcttgtttagctccattacgttctaaagtagcttttactgcctttttgttaaaagagtcgtaagttgtgaagttgccggtagccgctggccccgacttggtattgaccgcgtaaacactgaatttgtgggaacctccagaaatctcagaaaccttccaggaggtacctttagcctcccaagtaccggctccctctacagacaccacatagtgatcaatcggggaaccaccgttagtactagccgcatcccaagttagggtggcagttccgggtgtattgccagtgctacctctgggattgccgggggcgccgggagtaacctctaccactatctccggggaagtccccggcttagaatcccccacccggttagtggctaccaccgtgaatttgtgtgcttttttcccaggttctagccctgggaagtccactatggttgcggtagaggtaaccgatttaccggaaactgaatcggtaactttataaccggtaatcggcgccccattggctgccggggcaatccagctaatagtggcagtggtggattctttaacggtagcggttaccgcagtgggcgcatccggtactgtcactacccgaacccgcgcggtgccggtcacctggcggtccggatccccagaggcatcctgcaaggtataagacaccaccatatcgcctttaaaattagctgccggggtaacttgcaattgagttcccgaagccgaagcctgaccggatccttgcaccacactgggcgatcccacagttttcaggggttttccgggatagggattggtggcgtagcgattcaaatcaatactgagggtcttacccgactcgccctccaaatcaatcgccgttaactggattaaggggcgggtagagctgaccacccgcaccggaattttcccggtagtcggcccggaggcgtcctctaccgtgacttcgatattgcccgcgttacctttggctttacccgcatccgccgaaaccgagagcctggtgcccttcaaagatgctttaatcccggccggaaccgcccccagacggtaacgcatttttgcggggttatcgccatctagatcgctaaccatatccgcaagattggtggtaacagcctcttcacctgcagctacgtctatgcgcgtgggggtgaaaatcgggggacggttatcggtggatttaacatctatcggcagggtcagggaggcactaagggcggaagagtcattagatttcccgtcacttacttgcatcaccagcgaagttttcccgaaaaattcggggctaatagttacttggaaggagtcatctccggacattttcaccccgccggaaaatccggcccccaaggtgatagctttcgcggagtgaatatggggggtgcgtgccttccgggtgaccacgtaggaggccaggtcgacagtcaaagtttccccggactgggcttttatgggcacactatcggggtcaatatagggtttttgctcggaaacccccggtacattaactatggcgttggcacttaaaccgtcctggtcagtgactttatagagcaccagttgccgcttagaaggcgccggaatcaccagctttgatcctcttaccgtcacccctttttgctggcagctcacggtcagggcggctccatccccatcggggtcaatgtcattggcgaggacgtctactacaatcggttcgccaactttccttcccccctctttcgcggtcaccaagtcatcggcggcctcgggagcctgtagcggcgcatgggggtctacctgcacagtggcaatcgaggtatcttgtccgcctcgtccatcggtaatggagtattgaatcccgtaggagtccgctttcttcggggtagtaagcatcaccgcatcttgacgtgcggaaactttcaaagaatcccccggggtttgcaaggattccggcagcaagccaaccccgtcaccgtcaggatcagtatcgttcgcggttactgcgactgcgagggcgcgattcggccttacccgtacttcatctggattagcctgcggattttggttaagggcagaggcgggagccaccccgacctgtacccgagcggttccttgtttaccgaagcggtcttccacgatatagctgaaagtatcggtaccgatttttccagctattggctggtagttgagccagctggggccaatatctactacccccatcttgggggcgtctgcaatccccaccagggaaactgaatcgccatcggggtcaatattggttagttccactggtatccgggtggtttgccccgatatcgcccgaccggtcactactcgcggctcaggagccgcattatcggaggcattggccggttttatctctacactgactcgcgcgctggcctgattctggttggtgtccgtgaccgtgtaggtggcctcgtatttgccgggtttcttcgccatgaaacgcacctggtttccggtcacaaagaaccttcctgcctccgcgggagtagtggtttgcagtttgggagacagcttcagggtgagccccacgggggaacggtcattagccagcacgtctacgctggctacatcccctactcgccctttagcttcatccggtttggcgttggggggtgtagtcgccgactgcgtcctcatggggataaccgtaactaccccttcggcactttcatacccattggacacctggtattttaaggtttctgctttggtgattccgcggggagcggtgatatttaacagggaatgatccatcacggttgcccgcagcggcgaggattcccccacggttaccgcctgggtgactagcacttcgccagcggggtcggcatcgttggcgagcacatcggttagcacttgcccgccgatgggcagtaccgccatatcgtcttctactaccggtttcccgcgtttgcctgaggaagtgacatcgacccggataactccggtggcggtggcggggccgtcagacacggtataggtcaaataataggtgccttcttgttcgctcttaaaagataaagttccccccgccaaatccggggttacctgcggaccggttctttcaatattgactcccgccagggtcaagggatcgccgttcgcgtcggtgtcattagcgaggggacggattgtaatagtgtttcctgcccgcgcaaacgcaatatccccgttggcttcgggcggcacatttccggcggcacgcacatccacgttcacccgcccggtgatttcttcgcgcccatcagataccagcacttttatttcttttttaccgatagagccgccctggttgcggatcaccagggtgccttcttgtcgatattcgacttggttttcggcgctagcggataccccggtcaggaacaccggatccccatccggatcgctaaaggcaggcagggcgttgtattcgatctgcttacccgattccactactaccgtgggtactcgcttttgggtcggggcattattttgcgactccggggtgatattcacggtcacattggcggtatctaccccgcctctaccgtcttttgcctgataggtaaagtttatggttccggaggcatcggcgggcagctcgatccgcagcgcggcgcctccccgcactggtttcacctgacctttcttggcctgccctacgacctcggcggtcagtaaatccccatcggtatcagagtcgttttccagcaccggcaaagtagttattttccctggtcgcgccccaaacacatcgtcgcgagcgaccggtggagtattttctttttgccgatctttctgcgctatttcttcggtcaactgcggggaatcttcgcgctcttcctgtttctttaacatggtggagatttcatcccagttatctaccagttccatgtttctgtcggctaaccagactgcgccatcagcggtgtcattgagtaccaccaaatcgcggttcttgcggaacaccgggttctgtgcggtttttagccgctccaactcttgggagggtcggtaaactttcccggagcattcccgcacgaacttgccgctacctgcccacgccccataaacgcattgggctttcaccatcgggcgggcaggggtaccgctactacctccagagggaatctcgctagttcccccgctagaaagatcaacttttagcagtttatcctggtcggcgaggagcacgaacggttttttggggccggattcttgcagctttaactgcgtgccctgcagttttattcttttcccgctgggtaaatagaggattccttggtcaccatcgagggcgactgcctggtctcctacccctgctacctctagtttcgcgttaagtggcagttgggaaagatctacccgttcgtccttccacagctttccttcttttcgtacggttatcagctctttggtggtagctgaggccaggaagaaagttcctttttcccctccggccagctgagcgccgcgtagggaacgcacgctagcattagcccggttgcgctctactcccaagaggtcttttccactccagagcagaccggcttcggggtcaagaatcgccaagttctccccagattgggcgatttgctgccctttccccagggaggatgaggtttctaggcgtactttcttagggtcgattttggcggcttcactggccgcttggttctggaagtgtacgttttcacccgcctgggtaacatcgaactgtccggctttggaacggactgctccatctaaggcgcgtgcgggaaagttcaaatgccccaccaggtgttgggactggttagttacccagattccgccatcattcagatctacctgcgccttagttattccgggatgctgccaagccagataggcgattactaggctgaggacggtgagcactcccaccgcggatttgcgtatccgtctgcgccttttagcattattttcccgtcgcgcccggaaactggagtatccggtagttccagtttgctgctgcgaggagctattttgcctggagatagagcgagcggagtggcgaaagctccccttacttccccgcaacctaaccacagcgacgtcctcttctcatcttttaatcttccgccgccaacccgggaaaacttttccgcgcaggcggggaactaacctgcaagtatttactaaataatgagtctactaaactccagcgcttctccgccgcttttaatctatttttgtccccgggtatcggttttcagactttccgcaacctataggcggagctaatcaactgcgtgttttacggttccaagctccccgaccgctcttcttttaccgcgagcagcggtttccgaaatagcggtctgtttattttcctaactattcatgaacagtctttcagatacactactgcactgcaaccttgatatcgcctctacctgcaaatatgcttaactatgaatataggcacataggaatccattgcactacccccccccatttacataaaatgaaatagtgctaataaagaaaaaagtttcctccgtttttcagttcctagccactctcgcgaccctcgcggtgattgtggcgctcgggtcgaccaatccggcagcagccgagggcgtgaccagctgggacgacttggtggctaaagccgacaccttcacttccgggtcacacgacctgacggtcaccggcaacctcaccgtgggtgagcagtcaaaaccgctggtagttccccagggcgcagagctcactcttaaaggcaagggcagcacagttaccggaattaacaagacggcagtggaagtgaaatcgggcgggaaactgaacctggcgggtccctccttcaccaaaacacagttcacggtaaacggagacttaaactttagcgccggttccattcacgattccgaccccgccggcccggtgatttttgttgacggcggcaccttcaccatgagcggcgctgccattttctctaataacaccaccacagtaagtgcaactcctacccctcagggcgttagcaggggcaaatatgcgccgataaccgcctacggtaacagcactatcaccatcagcggcggatccattacagaaaacaataataaccgcttgactcgtgggggcgccatagaaatttggggcagcaaagataatcacgccacccttaatatccagggcggagaaatcgccaacaacaaaatagaaaaccccgatagtaccggtcttgggggagccatttttggggttttcaccgacgcaaccatttctgacggtaatatccacgacaacttcacggagtacgccggcgcaattgcactctttagcggatctctaactatgagcggtggcgccatacaaaacaaccacaacaacatgaaatacagtggggaagccggagcaatgatactgggatccgtaaaaaccgagatttccgggggcaccttccagggcaataccggcagtgatgacggtagcggagccatcaaggctgccggcagtgacctgcggattagcggaggaacttttagcggaaaccaaagtcgagacgggggtggtgcgctaatgtcatacgatggcaagctcaccattgacggcggggttttccgcgataaccaagcagatggatggggcggggctatcggcgctaggggaggcactgtaactatcaatggtggttctttcaccggaaacactgctgagaaatccgggggcgcaattgccctgtcaggtggcacgaagaaatacgacggaagccaaaccgtgattaacggggggcatttcgcaaagaatacctcgaaaggcttttggggcggcggtgccatttacaatgacactttctcaaaactcaccgttaataatgctctgatcaggaataatacggttaaagattcattattaatcggtgccgggaaccaccccattagcaagcaaggtggcggagtgtggaactgtcccaccgggaagaccacgctgaacattactcgcggggtcgcattttatgggaattccgccgaggacacccctaaatatgaaagtttcaatggtgccggggatgatttcgccagtatctctacccacaccttcgggaaattcaccgcaggtcagccagtatctattacctctcggatgctaggagggggacagcgcctctggtatcaagacggctcaatccatggtattcactctaactgggacttagctaggcagctgccgcgttataaagagggcggcgataacaagctgatcccttacgacacggaaatcaatgaaaataaagctttcaagtcggtacccagcgaagactcaaagaaactcgccgagaaactagcacgagtggttattgaagataactttgcgactagtgccggtatcagtggcgcggggatagccaataatggtcagctggctttcggtgaacccgaaaaatggaagcttcaggttaagaaggcttggcaaggcgatgacccggagcagcgtcctaccaagataaccctggacgtgctagtcggcggattccaggtagaccaggtggaactgagcaaagaaaacaactggacggccgtgctcgaagacttccccgaccctgacaccctgaaagacgcgaagaccgacaagaaactgccgatcaccttcagagaacatgacgggaacggcaagcagctggatggctaccagctggccgtaaccggagagtctaaagacgagggaaccaagacctacaacatctcggtagtcaacaaaatgaccaccgaggtcgaggtgtccaagaaatgggcaaacccggatggcacttgcccagacgcctctcaaattgaggtacagctgctgaccaacgggaaagcgaccgacaagaaacttaccctgaacgctgccaactcttggaaaggcaagttcgaggatctgccgaagtatattgacggtaaactcgcgaaatacactgtttccgaggtagcgatacagggatacagcagcgaagtaagtggcaatgccagcaagggatttacgcttaccaatacctgtacggttcctccgcccaccactaccccacctcccccgccgggagatactcctcctccgccaaagaagactcccccgctgccgcctaccggctctggaattagtgcggcgctagcgctagggatcttggcgctggctagcggagtggtgctggtacgccgccggctgcaaaacgcctaaaaccgctcagattctgacagtcatttatgggtcaaaagccctagaggcgtagactgccgctatggctgcggaaagaagcgataacggtggctactcccgaggggatcctgaatatcgacgcatcgaactcgcgctatttattgccgcgttcgtcagtttcgcgcaaatgtacgaaacccaggtgttattgccggaaatctcggagcattttcacctagatccttcggctgcgtctctaacggtttccctcactaccggaggcttagcgcttgctttattcctggtcggtccctcctccgagcgactggggcgccgacccatcatactcacctcaattttggtaacctccctggtgggtatgatgctaggctttgtccctacctggcatcttttgctcgccggacgtttcctacaaggtctagcggccgccggtctgcccgcagttgcgaccgcctacctcgccgaggaagtgcgcgctaaagatttaccccgggcagccggtgtttatatcgccggcaccggcctgggcggtcttttcgggcgcatcctcagcggcgtcatttcccatttccttccttggcactgggtcttaaccgtgattggcgtggcgggagttttattttcgctgtcggtctggcggctgttgcctccccaagaaaacttccagaagtctcccccggggttaaacaccttgatagcccacaccaaagcggtgcttagtgagccgggattggccttgctatttctgattggcgccttgacgctgggagcctaccaggcggttttcaatatggtgccctaccgtttcagcgccgccccctacctcttccccgcttggatcgtgtccgggttcttcctggttaatgccttcggctccctagccgcctcggtgagcggcaacctagttgcccgctacggcagacggcgagtaatgcccatggcggcgctgctgactttaatcggcttggtattgaccatttttgaaaccctgtggatcgtgattcccgcgctaataatctttgctatcgggttcttcgctgtccatgccaccgcctccggctgggtaactgcccgcgccgttgcgggagtgggtgctgcggggcaagcagcctccgcctattccatttcttactacctgggaggctcctgtttcggcaccgtaggagggatcgcctggtatcactggggttggtcaggtttagtcgccctcaccgccaccctgattgccctagtagtagtgttcgccctgctcctgcgaaaaatcccacccctacaaaaatccggttactaacctctttccgtacctgttcgtgcactgagcgtaaaagcgctcgggggaccccggtgagccttgcttcgctcggctcaagccccctctcgcatcttttacgctcagcacacaagtttgcgagagagataggttttatccgagtaggcgcggtgggcataagaaatcggggagagactagatctctccccgatttcttgggcaggaggaaaaatatatcccccgcgcacactataggctgcggagctcttttaccgccccgtatctataccctgttgaggaaaatctgctaccgctgttcgcggcgacgtaggattaggtatcctccggcgaggcatgccagcatggcacctagcgccacgctaacttgcgcaccagtctttcctagcttcttatgcacgtcaccagtattgcccggcttgcccggaatcttggtacccggttccggctcgttggccacatagatataggcaccatcgtactgctgggtttcatccgcaggattcttccaaatggtgaaggtcagcggctcttctagtagcttgtagcccttaggagatttcacttctttcaactggtactcgtactggtcgttctcatcgctaaccgacagcgcccatttgagttgttcctggtcgcccctaatggtgacttccccattcttatcggtagtaaaccgcaggggctctttctcagcctgctctggggtaagcttccccatcagcggctggaatttaccgtccttcttctcatagagttcgaactcggcgccttccagctgagtggtcaagtcacgggaatcatgcttatgaatggttattccggggttgggggcgctaccgcccccgcccatacgcactgccacggaagcttcaaccttggactgttccttcccgacctcgacctcgttaccgtagttaaccagatccttgccgattactttcgctttataggtgaccactactttctgcttgttcggcacctgcatagtgagcaccccgtccttatacaccggccggtaatcataatcggcgggggtcatcttcaaggtttccggctgcagacgcagatttgtcatctggtctttgaagttcgcagtctgcgccccattagcaatatctaggccgccggggttaatggtgaccgtaaaggacgccacatagttgttactcaaagtaggcttgtcagttagctctttggtgaggggggcatacttgtattcggcatccacagctttcgtggtcaccggcccccaggtggcggtgttgctgacctttaagctttctgggttcttattgatggcatctagcgctgcccgactaaccggaattagcgagtaatccaggtaatagacagattgctttttgccttccgaatccttcggcaacttatcagtcttcatctcgaagttaatcacgccatcttgctgtgcgatctttaggttctctacacctgacacattgggcttcgggtcgtcagccaactttaacagtttggcatcgaacttgtcagtgatctggaaagcatccttttcatatttatccagtccttcgaggcgtagccggtagttgaacaccggatagtcaaccccgccgatttccttgaatttaatgccgttgaaggttttgtgaatgccttcgggatccggggttgccgctgccgacgcggtgcggtcaatgccattggcggtggccttcacccgatttacgtgccggtatagactatcgtcaccagcgcggtaagcctttacccattctggatcattattggtagtgaaagtaagttttaccgtgcgctcgatgggcttctgttgatcgtctagttcattattttccagaagtcctttttctgtatgctctttatttttgaaaaactcaatggtaaatcccctatcgggattctcagggtctggttcgaacgtatagtcttcgtctccgatcaagccttgaaccgtgatcttggtgtctttattcaacgtgtcctggaaagatttatcgccactcttggctgccggcagggtatccgtcaatactagggagtcatagccctgcggcaccacattgacggctacctcccaagtgaccttttctggatcggcggaaaaggctttcttttcaacgttaaagatatgcggaggggtgaggccgacggtgggagccactacttcctccgggccattgggattgctaggagtccggctggaagcaccattcttcaccgaagtcggcacaatctgctgggtgacatctacctgggtggtataggtgatttcgtagctggaattttctgggtcagtatcagtaccgggcaacacgtacgaccactcgaactgtgtatccaaatcggtgatgccaacgtctgcccatttaatctcgcgggttttctcgatagagttgccctccgcgtcctttttacccttgttgaccacgagcgtaatgccgtctcccgcgtacttcatcatcttttggaactcttcggggatggagtctttgactttattacctgccaccttcagcttcgagtatttattaacgttcagcgtccacggctgctcgtagattcccgacttaggagccgtttctttcggactgccagcacccttggtgatggtgccgatctttagcttatgctccaggtcattagtggtctctttaggggcgggaatctggtcagaaaccacattggctttattctcagtttgagccttggagccagcctcgtccgggttaatcttggagtaatcaacgctggcggagtactcgaccgtgacccgctccccatgcgtcatcttggggatggtcaccgtaaacccatttttgccaaactgcggtacgccaggtttgggggcttgcttattcgaggacttgatcttgaatgctttgggatctttgtccaggtgaagcgcggtgtcgtcaccttggatctcgtcagaaatcaccacattttcgttagtgtttatggagttaaccgtcagggtgtagaacactttcccggcagcaaaatcatggcgcgcactcttagtgatagacagatcgggatcgttagaaaccactacgtccatatggacgccatttttcaggtcgatcttagaggcgtcttttgcgaactttacatctaaggtgacaaagaacttggcctgcggggactgagttaacttctcatctttagctagctttacatggattttattgtctttcgtcacccaaaaggtattgtcctcaacgggtttcccttgagcgtcgatcgtgaactttagcggatttttggtgggaaaagcctgcagagcggcaggtaaagcgtaaacgagttcagtatcgctaggtatttgccattcaggaccgggtttctcggcaaatcctagtttcaactggtaaggggtgtccgggtggactttatatttcccttccgtatctttggtcagttcggcgccaccgtaggacagcgtcgcatcgttagttaggaacttggtgaggtcaaaagtgccgtctgctggatccggagcaggcgcgcccggtgctttcgcgggacctggttgctgcgtcgggtttgcgggagtggtgctttcccccggcgaggtcgcgggggcaccggcaggggcaggcgaagtagtagtggcagcggggtcgctagctgtctgaacgggggcggaagtgccatccccgcttggctccgcatagctgaccccagcttgcggcccaaatcccagcagcagtgtaaacgctaacaagggaagcaatagttttaaggcacgatatttccttttttgccccattgcgcgagtggatcccgttttcatacttatctctccctgagttaatgcgcctatttcccctgttcacaacagttaagctacactaataaatctctcatataccaccctactatatacctcctacctttagaaatacagagggaaattttatttcccaaatgctttttgttgctaaaaaatagcgacttcccgatttttaccccaccgccataacctcaagtttcccccggcccccaacaacccccggaactccagcgcccgccctcatcggtaaccaaaccatccttgccgacccgtatcccacaggatacgattagtaaaatctaaaagctaaagacgatccaagctcaggacatagaaaaggcgaagaatctcgctaaacagctgaaagaggagggaacatggcaataaatatttcaagctgggacgccagcgagtatctggaaagcgcagatgacatagctgcctacttaaatgctgctttagaggacggggatccggcaatcctgcaggcagctctcggggacgttgcaaaagcccgaggaatgagcgctatcgcccggcaagcaggtctggggcgcgaatccctctacaagtcattatcactagagggcaacccctcctgggcaactatcaccaaagtattaaacgcgctcggcttacagctagaaatcaaatcgccggtttccgcctaactttcccgaggtatcaccaacctccccctaagggaatagctgggaagcggaaaagcgcttttttctgctttaggtgaatctgcttcctagcgcggtttatttaatattttcgcacgtcactgttttttaaaagctatctccttgcggttctacagaggttccgttgcggttttacagtactttcgttgcggttctacaagagtttcgttgcggttctacagcaggcaaaaccatcccttagtcctccgcgagtggctaaagcgcccgaaagacacccatacaaattcgcgccggagggtgattctgcaccgggagggtgaaaatgtcgcctatccccctaagcactcccaattccccgaaccaaaccaccctccaacgatgaaagcgccctccagctacgaaagcgccctccacagacaacgaaccacctaacttgtcgtccctcccccccaaccgggagggcgattttgcagcaggaacaaaatagagttaagaaaaataggaggagtttaagatgagtgatttcgatattgcggaggccgtagaaaagctaggttcctggcaagaggaaacctacaagtgtctacatcagcaccccgagctttctatggctgaaaccgaaacctgcgattttatttaccagcagctgcaagattttggttatgaaactcaaaaaatcggtggcggcgtcgtgggggtgctaaaaaacggcactggtaagaccacacttttccgcgccgatatcgacggactgccagtaaaggaagaaaccggactggactacgcttccactatcacccggcgcgatcaagacgggaatgaagtccccgcgatgcatgcctgcggacacgacgtgcatattactgctggtctgggggcagcccgggtactggccgagaaccggcaggcctggggcggcacccatattgcgctttttcaacccggtgaagaaaccgccgagggcgcaaagtcaatggttgccgacgggctagttgagaaacttccccgccccgatgcggctttcggccagcacgtcctcaccggtcctatgcctaccggttcagtcggcacccatattggcgccatcctctcgactggcgcctctttgaaaatcacggtgcatggtaaaggctcgcatggatcaatgcctcatatgggagttgatccggtggtgctcgcctcggcgattgtgctgcgcctgcaaactattgtgtctcgcgaaattgatccctttaagatggcggtagtgaccgtggggtcactgcaagctggttccaagtcgaatatcattcccgaacgcgccaccttgctggttaacatccgcgcctatgacctgcaagtgcgcgagcacctcttggcggcaattaaacggatggtgaacgccgaatgcgaagcagccggaagccccgagcctgcccagttcgagctttacgattcctatcccctgaccaacaacgatgccgaaaccactaaaacggtaaccgacgcattcattgcacacttcggatcagagcgcgtaggtgactgcggcgaagttccggcctcagaagatttcagcaccatcccggatgcgttcggaatcccctattgctattggggattaggaggatttcgcgaagaggaccccaagttccccaatcacaaccccaagttcgcacccatcatgcaacccacgctagccaccggcaccgaagcagcggtggctgcagtgctggcttggctggggaagtagaaagcgttattccctgtgaggaactttccatatgctcccacttcacaatcccactttttaggaaagcattagcgttagcgcaaagcctagcccaattccgcagggaatcctgtcaggatattccgcatacgtaagttaccagcgattcttctccacgagaaaggtgctatcgaacgcacgcgggctgatagccggttattatctccccaatactactgttttagacgttagctaaacccagatagttgcgcaaagtacaaactatcttgcatagcgctataactgcgattagaaaaattgcaaaaaaatacatctatttaacgcctaattgtattttcttcaaagtatattgatgcaaaaataaggatgaatgcaaagatgcatggcaaattatctaatcactaaggagtgataatgaaaaggatagccaaacttgcaaccgtttgtgttgcagctttagcactcggtggattatccggatgcagcgggagcagcagttcctcgaaaagcaacgactcagaaataatagtttggagccaagtgacgggccccgatgcaaaagcggcaaaagctacttttgacgattacaacaagactaatcctgacgtaaaagttaagatgctcacgatgaagaaggataccttcaacgccaagctagctaccacggctcgcagcggtaaggatgtgcccgatattgcgtgggtggcgtccgaagaggttccttcttggcagagccaaggaattttagattcttgggataaactaattaaaggcacgaagctaactaaagatgcttatttgccagccgcttggactgcgggacaggtggataactctcaatacggaatccccggaaccatgggtacctgggtcatgtattacaacaaagatttagtcgataagtacgtccctggcgccatggatgacggcatagcaacttttgaagaaatagaaaaggcaggtgctgcagctaaggccgatggcgtctattcttatgcaaactcttggccgttccagaactacgataatctctatctacaaatgggcggtaagtggactgataaaaatggcaacatctccgtagacaacgatacttctactaaggtctttgaagagttaaagaaccttttagacgagggttacatggttccggacggcaaggaagcagtcaagttgttcatgaacggtaaactgatttttatgcccgagggaacttggcaactctccacagtaaaagacgcgaaattcgagtggggagaaacgacagttccccaatgggatctggaaaacctagtccaatgttccggtgctgatcagtacgtaataatcaagaacaagagtggccgatccgaagaaaagctaaaggggatggtggctttcatggaatggctacagtctaaccaactcgaaatgttgaaatcaggggcaaacccctcggctaaagccatgctagacaactcagaatatgcgagcatgccgcaatccttcctgttaaagcaggaaaacatcgccaaatctgtcaacgtaatcaacactcctggactcagttatgtaaacaccgaaatcgatgccagggcatgggacatgatcactggtaaggccaatatcaagcaaactatgcaagatatccagaaaatcgctgaacagaaaatgaaaaagtaatatttagcacccgttttggcgggtgggtaccctggggtacccacccgccaaacttaaaaatcagaccataccatttttggggttgtatagttatgaaatccgaaaccaaaaaacacaagagccgtatacgcaatggcctgtgggcgactttttttatagggccacatagcgttctgttcatatcatttttcttatttccggtcatctatgggatctatgcatccttcacaaaatggtctctcttcaatgacccgatttggacgggactagcaaactatagagaactactatttgataaaaattccatattccacgaccagttagtaaatgggctatctgcaacactaattttcgtggtttttactgttcctctatgcataatagtccctttgatactggcggcaatgttacagacacagcaaaagtttaagaaaatttttcaagcagttttttacattccttctatgttcgctgtttcagctgtaatgctaattttcgcttttttgctaagccgttcttatgggccctttaccgaatggttcaactttgatctcaacgttactcaaacgcagccttacgcgtggctggcgttgattctagtcaccgtttggtggtgtatcggacaaaatttaattatatatatcgccgcattgggcggagtttctcaggaagaaatagatgccgcaagaatagatggagcttcaaatttccgcattctccgtcaaatacaactcccaagtatccaactgccaatgctttttacagtaatcacaactaccgttttacagttcaacgtttatggccagcctctgatgctgacaaatggcgggccgaatgactccacaaaagtactactcatgagtattcaacaaaatgcatttggatcaggggtaccggttgctggaatggcatcggcgatggcaacaatactagggctggtaatcatcctggtttccgcagtggaactcatcattctaaaactttgccaaaggtaggtaagccatgaagtttagcaccgttgaaaaattttttgccggaattattctcttagtactttcagtcctatggatattcccagttgtttgggcatttttcacctcattcaaatccaaagatgagattatttctagcagttttagtctgattcctaagaaattcactttggctaactatatcgaactgctaagcgccaatgaacaaacacctgtattgacttggtttttcaactcgttggtaatctccgtaggtgaaacgctgcttgtgttaattgttgtttcactcgcagcctatggatacacccgagttaatttcaagggaagggacgtactctttctatttttactatcgacgatgatgttcccctcagtccttagcttaattcctaactataaaatcgtagacaccttggggcttttaaactctcccctggctgtaatattgccaggagcggccggagtctacaatgttttcttagttcaccaattcgccaaggcaatccctagtgagctagatgaggcagctaggatagacggagcgagccaccttcaaatttatttacatgtgataatgcctttattaaaaccagctctgacggttgtagcgttatttactttcaccgcggcatggaatgattttttgtggccctcaattgtactcaccgatgtgggaagcatggctataacccctggcctgcaacttttacaaggccaatacgaaacctaccctggtatttctaccgctggcgcattaatcgccttactaccaatgctggccatatttatttttgctcaaaagtatttcatggaagcactgcacatgaccagcggaatcaagtaattggagaacttcctatgatctatttacgtaatgagtatccacgtccgcagtttaagcgggagaactggcagaatctaaatggagtatggaatttctgctttgacgacgaagacaggggtctgcgtgaacgctggtttttacaagacacccctttcaagatgcagatcaatgtccctttcgtttatgaatgtgagctcagcggcattaatgtccaagagcgacacgacattatctggtacaaacgcgattttgatacaccgaccttaaccccacaacaacgcttaatactgcattttggagcagtcgattatcaagcacaagtatttattaacggtcagatggtaaaagaacacatcggcggcgaaaccccgttctctatcgatgtcacacctttcctcgaaaaagggactgttcaaagcctttgtttacgagttcaggacccgcttgataaccaagaaataccgcgtggcaaacagttctggatgccgaaatcccagggaatctggtacacgcgaagcaccggaatctggcaaacagtttggttggaagttgtaaacgatcaacatattgaatctctagctatcgaacccgatttggacagtggaactgttgagttcaatattaaaactaaaaccagcaatcaaaatactatcctgggtttgaagatttattaccgcgaccaactggtcgtcgagacacgtaccaaatgtatagagcccaaactaaagttttctgtggatatcgtgcaatcagatgtcttccgaacaggttttcatgacagcgatgaatacttgtggagtccagaatatcccaatttatttactgttaaactaacgctaatagatattgattcaaatattgaaatagactctgttagcagctatttcggaatgcgaaaaatacattcagagaatggaattatttgtttaaacaacaagccttactaccaaaaattagttcttgaccagggatattggcctagaggcttactgactgcccctgaagataaggattatcgtcgggatatttccttggcgaaagagatgggcttcaatggatgccgaaaacatcaaaaacttgaagatccccgttttctctattgggcagataaactaggttttctagtttgggaggaatgctcctctaccccgtttttcactgcggattctcagatagctattttcgattcttggaaagaggtttacctgcgagatcgcaatcatccctgtatcataacctgggtaccactaaatgaaagctggggtgttcccaatattcacttagatgggaaacaacagcactgggcacagactctgtatcatttgttgcgttcactcgacgacactcgtctggtgagttccaacgatggttgggatcaaactgttaccgatatctgtgccattcacaattatcggttcggcaaaaatgaagacgaccccgagttcaaagaattctgcgagactcttagtaccccggaggcgttagtgtcgcaatatgttagcggacgcccggtatacgccaatgggttcagttatggcggcgagcccattctagttactgaatgcgggggtatcggatttgctaccaatcaggaatcggattggagttacctcagcgtatgttccgaaaaagaatttttatctgcctatcgacgcctagtttctgcactctgcacttcaaagtatgtgcagggattctgttacacccagctcacggatgtcgaacaagaggtgaatgggctactaacctacgaccgcaagcccaaattcgatttgaaggaactacaccagattaacgcaaacaactagctcagcagctagaattggaaaggacaatagatcactcgcaaagagcccggagaacactaggtatggaacttcgtctggacaaggaatccctagtagtttaccgggctctggcatctgattcacggcttagcattctccaacagctatctcaaaaacccgcaaccgctaccgagctggcaaagattttacaccttagtaagacaacgctttcgagacacttaaaccagctacgccaagcaggcttgatacaggtaaaagaagactctcaaaatgaagatcgccgccaaaaaatagtttccttatctgtcgattccatagaaatagttttcccttcgaagatttacctcccctttgaacgtgtcactcagaaaacacctatcggttactattcggacttccaagccgagcccacctgcgggttagccagcaggaccaagattatcggggtaattgatgatcctcgtagcttcacttgcaacgatagaattcgctcccagctattatggttttcctccgggtttgtatcttatcgattacaaaaccctttagactcaaatcaacatgcggagatgctcgatatttctatggaaatttgtagtgaatatcccggatccaacaacgagtggaaaagcgatattttatttacaatcaacgacgtcgatgtaggatcttggacgagtcccggaaatttttctgacgttcgtggcatcttgacgccctcgtggtggaaatccaacttgagtcaatatggaaatctgattcatctacgaattaatcacgaagatagcacggtgaatggtaaacgtatatcaggctgtaccttaaatgatttacgtcttcattcttcccccttccttacggttaaaattggaacaaaacctgactctcctaatcaagggggacttactatatttgggaagtattttggaaatcacgcgcaagatatagtaaccaccttgtattattcggaaccgtcagttcacagcagggatagcggcacgctcctctaacctcggagtgttcttctgttacagttgcgggttgagttcaatcctgaactaccccaactttcttctgattacctgaataatgcagtcagtgagtgctttaggattattgctcagtaaatcagggtgtaagtactgcactttcaccagtattttgttgcggttctaccgaggacgcaaagggcatttctaacaagtacgactactaatgatagaaagttgtgggcaaccgattctccggctgcccacaactttaggctaattctcaaaccgttaatagcaggcagaatgcactactagcaaccgccagcgatcactcagtttccccagatggatctgagactatgaatctttaggtcgctgaccgcaatcactcccccaacagaggcgatactgaccccgcgtttatccccagccgggaaagccagcgaagataaactatagcgaccatcattgatgaacacctcaagcgagccgcgatcaatgattacccgcagtttcaactccgctccccccacgtagggagcagagcggtaaccgcgatcactggagccacttttaccccggtcaaggatcactcgattcgatagcgtgtcgtaagcaacctcggtatagcggtcgacacttgtttgttgcagcaacaaagaaacctgttcagaggaggttttatccagatctaccgtcaattctatttccccgacgctcatatcagacgcgatttccacggtgctatcggtatccacggtgaacgcacctttatcgacagtgttttcacgtaacctatcgaactctgggatcggggtagcaataattccgaaatcttcacccagcgagacctcccgcggggtcgccagctgcccactccaaccatctgctgcttggctggcaagcggcagggtgaagcctcccatccacgcgaacattaggcggcggttatcgggagaatgcatcgactgggtcgcataaaagttgtggccgaaatcgaactgggcgaagttcttgagaacttcaaagtccccgcccggagtccaatttcctaccgcataaccggtgttgtgtccattgcgttggttatatccctggcgacgtacggaagtcatcgggctgtagaccagcacccatttgccatcaacttcaaaaaagtcggggcactcgatcataaacgtgtccggatcaggatcttcgtagagtacgcgatcaaattcccaagtgtatagatcggcggatgagtagagccaaacctgcccgcacccctctggcgtttccacaccgagtaccagccaccatttttcgccctgtttccacactttaggatcgcggaagttagagattcccttcggattctcgataacgggcccgtgtttggtgaaggtaaacccatcggagctgactgccagacattggcgttggattgagccatcaccatcatctttaccgttcgcccagcggttacccgtatataaaacatacagtttgccctgatgctcgagggcgcagccagaccagactccgtccagatcgtattcctcactgggggcaagcgcgatgggttcgcgtttccaagtcaccaaatcctcacttgagaagtgaccccaatgcatgggtccccactgcgcactatagggatggtgctggaaaaacgcgtgatagcgcccttggaagtagctaataccattaggatcgttgatccacccggcggctggagctaggtgtacctgcggataccaacgcgggtttacgtcctcttgcgccgcagaaacgaatttatcggctttttgtaacagttattgatgctcactcaagggattctccttttagcggttgccacagactttaaaatatctatatctcgccatacccccctaaaacggaacttggacgccctcaccacaatcacgataagggcgtccaagtttcagtcattacctttaaatcacctaatctttgccacggttagagcgcattagcgtatttacccgcttgtttgcctccgtcaacgaggacggctcgctttcaaaggcgacaaccgaagacattgccggcttcatgagggcatctacctgcgcccaccggtcaactactggagagggcaccgtagtgccttcctcaatatgaaccgaaaatgcgcgggcatcaaaccccatatcttcaaaggttttgatcgctttcttcgttgaagaagatattgccgggaacaccgtaccttgttcagcgattacatcttggcattgagccgagcctagatatttaacccaacgccaggattccttaggatgcttggtgccaatccaaatcgaatctgccaaaccgttcattaccgaagcacgatgcccatcaggaccgattggggtgggggcaacttgaatcgggagtttagtggcgttagcgatagtagaaatattccacgacccctcaaccaggctggcatatccacctgatcccagagattccacagtcccgatccccgaggatgctaccgataacggcggcatatatcccttatcaatcaaggatctccaccatccaatactttcctggaacttcggatcgtcgtagttaaagtgcatcccccagggattcttttccgtccaggtccagcccccattagacaaagcataaggtgaccactgtacttgtccatatccagatccagcttcgttgtagcccaacgcgtaaaccttgacatgcttcttgtcgaaaccaggttcatccccgcgaacgccattcacatcaaccgtgagacgagcaagaaacttttcaaaagtccctccgtctttcggattccattctaacttccagaggtcttcttgggtataacctgcggctttgaccatatcctggttgtagaacagcgcctcagtatcccagtctttaggaagaccgtaacgatgtttaccatccgcagactcccactgttcggcaagccccggggcataatgactcaaatcaaacttctcggccttgacataaggttcaatgtccaggagctgccccaaagaagaatacttaccgaactgcgaagtatgatcggtgaaaacatctggcgcattttcagccaccatagaggctgtcatttgcgtccaatagtcatcccaaccgaactgttcaatttgaatatgaatatcggggttttgtttttcaaaatcggcagcacattggcggtatcccggaagttgtcccgaatcccataaccagtaacgcaatacggtttgccccggttttccactcacttgcgaactacaagcagcaagtccccctgcaagaatcagccccagggtcgccgccaaaacagcggtgaccattcggcgcccagaagcagtaaacgcagattttttcatgtcgagcctcacttaattccagagaatccaacagagttcacaatccgctttccgaggatgatgaacaaaatgataatgggaagtgctgccactaaagcggcagccatcagagctgtccagtccggcgaaccttgcggtttttgggaccggaaaatacccagcgctaccgtcagcacccgcacattatcggactgccccaccaataacggccacatatagtcgttccaagcgttaataaaggtcagcactgccagggtaatgatgggggcagaagccatcggacaaataacccggaaaaatacccggaacggacctgccccgtcgatcattgctgcctcatcaatctcacgcggaattccgaggaagaattggcgcaagaaaaatatcgaaaacggagtcataaagaaggtaggcaggattatccccgcgaaggtattgagcagacccagctgtttaatcaacacaaagttagggatggcagtgaaaatagacggtaccatcagcgccgataggaacagcgcgaaaaccgcatctcgtcctctccaccttaaacgggaaaatgcgtaggctgccatcgccgaaaacaaggtttggcctatcatgactgctgctgccaccacgcatgagttacgcaggtacaaccagaagttgatagaggctcccgcgcccccttgtgccaaagactcctccggagtagtcatccctaaaacccgtttataggcatcgaaagtgggatttttcggccataactgtcccgggtgtgccagcaactctgagttggtcatcaaagaagatcgcagcatccacaagaaggggaaaatcgttaaaaataacaaaataatcaggcatgcccacgcaccgtagaaacctgggccgcgatgcttactggaaccagtctttttatccgcagcgccctttttagaggacgcagctttggtatctgtcaccgttgaaacactcataactcgctcctcacagttcgtcggattcgccggcgcgcatcagtcgcagctgaatcagcgaaatcccaaatagcaggacaaatagcaccatggcgatggcagaggcatacccgaagtcgagctgtccgaacgccagatcccaaatgtagtagtagataacccgggtggcgttgatggggccacctttagtggtaatcgctaccgtgtcgaagatttggaaggagccagtcaaagtcaccaccaaaaccatggcgaggacgggacgaagcaggggcaaagttatcgagaaaaactttcgcccctccccagctccatcaatatcggccgcttcatagaccgtacggttgatggtttgcagccccgcgaaaaccagtagcgccgtataacccatgtgtcgccacacgttaataaatgcgactgtaggaatcgcccaggcggattccccaaaaaatgcgacccggtctagtcccacccaggtgaaaatttcgttaacgataccgatttggtaatccatcatgaagtaccaaaccagggcaacaaccacattcgctatgaaatagggcaacaatgccataccgcgaataatggtggagttggttaagcgctgcagcagaactgccaggacgatggcgataatggtttgaaaaccgatgttaagcactacgtagtacaccgtgacttttacggcattccaaaatagcgggtcgtggattagacggcgatagttcgctaatcctgtccatttttcgggagttagcactgcgtagtcggtaaatgaaaaataaaaaccgcgcagtgctggtagtaggtaaaagaaaaataagccgattccagcgggaatcaagaaaattaacgcatatcgcgtttgacgtgagttaaccacgcggtgttgcttcttctcgaagcaacacccagggatgtgctcatcagcttctcctttcagatttttttagggaacaaagctgggttaagcgcacatcattgcgcagttaaaactatcaaaacggtttgcataggattgagatccggtaggcgaatgccggctctttgcagcacggttcccggtaactccaatccctcgccccaccaggaaaccgtatcctcgccccaccaggaaaccgtaccttcgccctcgccaatcgcagacttgattcctttgggcagcagctcccggagccggtaagaaatggaactatctaatcccggtaagcaaagtgctggtgagagacgttgagccgatgtgcgcaggcgggtcaccgcaaacacggcctgggctttgtcctcagataccactccatgaacccaataaccctggtcggggtgatctacatgaacagttctcccagagtgcaagaaggagcgcagttccttatggagagctacccagcttgcaagttgctcaatctcttctgcagtagcggatgccaagtcccattcaattcccatatgcgagaacatagcgttggaggcgcgcagagccagacttagggtacgtccggtttggtgagaaaccggggaagccacatgggaacctaccagctccggcgggagtagcagggaggtgcccgcctctatcaacatccgctcaatgggatcggtacagtcagagccccaaacccgaacagcatattccatgattcccagatcaatgcgaccaccaccgctcgcgcaggattcgatttccagattgggatgggcgtttttaatttcctccatgagccgataggtggcgagagtttgctggtgatatgccggaatcccgctggcaggcgataccgcctcgtagaggtcacgattgaaatcccacttaatatagtcaatctgggtggatgccaataccgctaacatctgcgattttacgtggtcaaaggccccgggattggttaaatccattacctgctggtgccgggcttcttgaggacgatgggtacggggggaaagcatccaatctggatgatccctggccacttgggagtcggggttaatcatttctggctcaaaccacagcccgaactgcatccccttggcatgcactgcatctgccagcggggcaagcccatcgggccacacgtcctcagatactgtccagtcccccaaacttgaggtatcgtcgcgacgtccggaaaaccagccatcatcgagcacgaaccgttctacgccaacctcagctgccaggtctaccagctttaatagatgcggtagcgattgattgaaataaacagcttcccaagcattaagggtcactggacggggagtcctcggatggttatcgcgactgcgaacaaaactatgcatccgccctgccgcctcatctagtccgcgcccccaagtgccaatgatccaaggagaggcgtattcttcaccctttttcagcacgacttcaccgggtagcaataattcccctgctagtagtccttgatatccttgaatatctttttcggcaatggtgcgggtatttccggaccatgccacgtgtacatagtgaaccagcccgctgcgccaagaagtattggcttcacaagttccgtggatactggatagtgcgagcccgcgtgcgatccgcgtgtcgcgttgatgcgctccaatagtgaactcatgcttttgaatatcacgttctcgcagatgatgcccggtttgatccagaacataggtttctgctgccggcgtaggtagtcccagcaatagtgaatccacctggtaaccgtcagcgccagtgttggtgatcgtagctcgggtacggattatgccggaggggacgatctcaagttccaaagtgaggtcgatatcagcttccatgtcatgtagttttgccgacatagccgaggccgcaccgtcagttccttgataagtcagtttcatatcggtcaagttgaaagccgaaaaaagcgtgttgccgttacgcgaaccaactaaccccggtgtccctacccaaccctcactttgttgcggcactaaagaaaagagtggggaaacatcagcgttgcctaaaactatggccggaaattgcgaacgtgaaaaattttgactttgagcagcagttaactccccgagatctttcccccagtagagaatctgcggagtcccctgctccgtaatgcgcaaacataccgaagtgcctccattacgaagattaagtaacgcaggaaaattcatcatcaatccctcctagaataaaagcggagtaacgccacaccgcgcagacatattttcaatactaaaaacagtagcgcgagtgtagggctgatacaactacttttaaaaaagctggatacgccctggttgaccagacaggaatattttttaagggaacctgaaaagagaataatgacacggctatttgacgactcctcgctggcactcgttgcgcacgtcttggcacatggccccctttcgcgcgccgacaccgcacgggatcttgatttatcacctgccaccctcactcgcctagttcgtcctttgattaacaatgggacaatcagtggggtgtgttctgggatgtcaaaaacggggatggggcgtcccacgaaattgctggaagtttcttcccacaatcgttcttttatcggaattaacctgaccagttctacgatccactgcgtgcgcaccgacacccatgcacgcattatttctagtcaaacagttccgatccaaaatcggagcacagatgaatgcctattgcagttaaaggggctgattgacgaacatatccactcaactaagtacccctccgttgaaggaatcggaatttcattgggagggaaaatcgatggttccactgtccttgaaagccgcttcttggggtggcgaaacgtaaacctaaaaacttttttcgcagaaaccacagctgaaaacattcccgaaatagaactagttaatgacgtaaccggtttaaccatgttggagcaatggtttgggttgggacggcattgtgaagatttcgtggttgccacaattggggatggcgtaggtcatggcatggtccataacctacgagctgttcgctccccacagggcggtgtaggtatgaccgcccatcttcctctggcgggagcccacggcgtttgccagtatggacacgtggggtgcgctaatggggcgctgactgtaccagcgattttgtcgcgagctcaagcgggtagagccattaccgagaagggtaattcgccaacatcggcggaagaactcatgcggctagcagataacggcgataaatcctgcaggcgcgcgattgccgaatttgctcgaagcctggcggtgtaccttcagacagtcgcgtctgctgctttggttatggatgtggtcttggacggggagggcgtgtgcctattggaatcttgctgggcagcggatttcgacaagcatttaaattcttatgcccgccccgacgatcctcgaatcacggttcaccggcgttcaggtagctttgagcgttgggcacagggcgccgcggtagcggcgattgtaaagtggctaatccgcgcaactcgcagcgctaatggtaaggcgtaagtctttaactaccagctattatcgcttctgggcaatcccgctactgtagcgccgccgattctcagcagataacacctatcaataagtgagtcccttaaaaactagagggcgacgagtggcttcacataggggatctctttgctgcgagcctgatcaagttcataggcggtctgcatgtccagccacaggcgggcattaccgattcccgcaagctccagccgcaaagccaggctaggggttagtgccgctttcccattcagaacccgcgaaagggtaactcgagatacccccaacttgcgactggcgtcgctcaccgaaacaccaagttccttcaagaaatcctcccggattaccgccccgggatacaccggatttttcatactcattctctctaaccctcctcagtgatagtcaaggtaatcaacaagttccacatcttcacccacgaatcgaaagatcaaccgccagttcccactgactcgcagcgaccaataacccgcaagcgttcccgtcagtttgtgcgcacggtagcccggaaaggtcagcagcggcgccggatcatgtacttgatccaacaccgacagcatccgcgcaagtttatctgcgtgagcaggattgataccggatttcgatcctgattcgtaaaaccgctgcaatcctgcgtgtttgaagctgacgatcaccacctaagtgtatcgcataactttacagcacgaaagggctaaacctattcgtgactcaactcagttcttctgctgttccgtcaagtacacctcgcgactgacaagtgcgggagccaaacacatctccagcaaccgcggtgtccaaaaaagtccaacttgcacaacagaaacggtccaacttgcacaacgcacgataagacagggctggatgctggtgccgttctgaggttagattgcgccgcatcctgcactatcgggcaaaagggacagcaccccttgaccaatgtagcttttaagctacaattagggtgtgaaaattgcttccagcagcttgtttgacgcttcgctggaggggataaatctagccaaatcagagatattaaaaccgctcaaaacctcgcaaaacagataagaaaggaacgatcatgaacgaagtgactttttctgcgtttgacgcgagcaaatatcttgacactgatgaagcgataaatgactacttaactatcgcactcgaagatggtgacaccaaaacggtgcaagtggttttacgtgacatcgcccgagcacacggcatgactcagctcgctaaagaaactcagctcaaccgcgaatccctctacaaatcattatccaaagagggcaacccatcctttgcgaccatcacgaaaatcatgaaagccctcggactcaaaatgaccctcgccacccaatagccctaaaccctggaacgaaaaagatcaaccctaagtttttccaaacaatccgcccggattaccgccccgggatacaccggattttctatactcacgtttcctcgccctcccctggatatctctccctctgatagtcgcagccctgggcgccggttattagcggtaaacgtctttacgatgtcccagatcaactagaacaacaatcagttctcggtcccggatttcagtaatgagtcgatagtttccaacccggtaacgccagtaaccagagaatttgccctttaatggtttcccatactttctgggctcggcagtattgactaggttcttttctacccccgctttaatcatcaccaataccggcttatccagttttttcagggctttcttggcttctttcgtgtagtagagcgaataccgcttcatacccccaattccgcccataaatcatcgtgggagtacagctccgcctcaccggcgaccttctgcttttcataacgcgcgatcgtctgcagatcgtattcgtcctcaatgcgttccatcatggttgcgcgaataaccgcagataaactccggttatgaatccgcgcgtaatccttatataaatccagctctttatccggaacccgtaaactaatcgtccccatcatctctcctcccagcgctgtactacaagtgtagtaccacctagattgagggcgcaacagttttacccctaaccgagggcgaaaacccgggatgcttcacccgataacgccagtagccacaaaccacgggtgtttattggacgtgtggttcgggacgatgtctatcactacccgaatgccacgctcacgtaatgccgtcaccaggtcgagaaactgcgccagcgtaccgatacgcggatcaacatcgcgatagtcaatcacgtcatatccgccatcagatagttctgacggatagaaagggctgagccacaccgcgtcgatatttagggaagccaaataattaatacgtgaggctatgccagccaaatccccgatgccgtcaccattagagtcagcgaagctgcgcggataaatctggtaaacaacaccttgacgccaccaatctgcgtctgaaaaggcgataatccttccttaagctttcttgaaagacaagatacgagattcccagggcgccaaataatccggtgcattatcggcatgggtgcccagtatcagttcgccgccgttaagatccggcaggtcgtttggaatagccgcccgcttagacgaacaattcgctaaaactaataaggtctcgtcaccgagggtacgggtaaatgcccaaatttgttcgtgttccgccagcagcaattcaaagcgaccttcgcgcaccacttcagattcgtggcgcagtttaattagcgcctggtagtgcttgaataccgaattcgggtcttgacgagcagctttggcatttatcttcgggtaattcgggttgggcttaaaccatggctcaccattggtgaatccagcattggccgactcctcccattgcattgggatgtggggcgtttcgacgccgcagtccggacctgtgtactcatggtgatgttcttccccgcccgttaccgcaaacgcatccacacgctggtgtcctgcggcagcatgccgtccgcagtcagctctcccgagcacagcagcacatcgccctcaggcagggcggctggcgtggcaccgaagttcgtcagattcgcccagccgttgctgcgacgataggcgatcacaccgcccgcattgccgtccgctccgtctttgcttccggattccgcatcctgctccaaccattcgagctcggtgtcatacagcttcaactcatggcgtaaggcgagcgcccgacggtacaggttgagcatcgagttacggtccgcccgctctcggtcaacggcgaaatcacggaaccacaagggctgagggagatgcggccgggccggggtcttcccgtcctgcgcacgttcaggcgaaaaaccgaaggaccctgtctgcgcgaaagcactcccaccatcacgaacaccggcatccgccgcgacccaaggcaggggcacacggcacccatcacggcctttgctcataccggaacgggcggtgcgcaaggcagtcgggtcttcgagccggtcccaggggatatcggccacttcgaacaggcccagctcctcaccctgatagatgtatgcggaaccggggagtgcaagttccagcagaatggcggccctggcacgtttggtgccgagcgcgcgatcctcgacataggtcttgccatcacgcagcagccaatccaaagcgagctgatgctgatgccccggtacggaaacctggggcaaggcgtatctgctggcattgcgcggcacatcgtggttactcatcacccaggtcgaggtcgagccggactgcttcgccgatgcgatgccttcggcaatggcctcgtgcatctcgtcgcggatccagttcttcttcgcgaattcgaagttgaatacctgtccgagctctttggggctggcgtacagatgctgcctgtcagggttcacccaggcctccgcaaccgcgaaacgcggaggattgtactggttgaacagcttcctccattcacggtagatctcatgcacctcatcgcggtcataggtcggatgcgagccatcggagggaatgggcttgaatacgtcaacatcccactggtcaaggtcatcccggtccaggtccttggccaaagcgtgtgcgacatcgacgcggaaaccgtccacaccacggtcacaccagaaccgcagcgtcttgaggaagtcatcacgcacctccctgttatcccagttgagatcgggctgatcgggcgtgaagagatgcagataccattggccgtcggccacacgcttccaggcggaaccgccgaagttggcgatccagttcgtcggcggcaactcgccatgctcgccccgcccctcgcggaagatataccgttctctcgccgcggaacccggttccgaattcagggcctgctggaaccacggatgatggctggaggtatggttcggcacgatgtccaccacgaccttgatatcgcgggagtgcgcggcctcgaccatttcgctgaaatcatccatcgtgcccagacgactgtccacattgcggtaatcgtccacatcatatccgccatcgagcaaatgggaggggtagaaagggctgagccagatcgcgtcgatgcccagatcgctcagatagtccattcttgaggtgatgcccttgatatcacccaaacccgatccggtgctgtcgctgaatgacctcgggtagatctgatagaccgaagcctgtttccaccagagctcgtccttcagcgcgtcggattcctgcgcatcggttccgaatacgccactcacggccgttgtgtcatcctgggatactttgaggttcaatgaatctgcactcatagtcaactctgactttcttccaatcgtcattgatagtgtttggaacaacaacctttatgctagcgcttgcataaatgttgtgcaagcgctagcaataaatagtcactgaacttcgctccccacgtcccgccgatgggatagcgggcggccgatggcccttcacagtacaattgcagcagtaagcaggagattccaggcgggacagagaagaatgttgttgaaggatatagccgaaatggcttccgtatcactttcgacggtttcccgtgccctgcacaacgatgaacgcatcagcgaggccacccggctacgcatccaggccatagccgaacgtgagcatttcctgctgtcgaaaagcgcttccgcgctggcttcccgcaaatccttccgtatcagtgcgctcttcgtcgaccgcttcaacacctggttcacctccacgtcatttgaaggtctgtatacgaccatcgcaggaagcggatacgatctctttcccatcgtcttgcacaccccggaacagatggacagctatttccgcagcatctccgagaacaagaacaccgacggcatcatcatcgcctcgattctgctcagccccgagcaatcctcccagttggcggatgccaacatccccatcgtcggccttgactcgcaggacaccgaaggctatgacgccgcggtgctcctcgataacaccgcatccatgcgggacgccgccgagcacatacgcgatctcgggcacccgcaggtcggcctcgtcgaattcccccaaccagggtcattcaggcgatacagctttaccgaacgcatccccaccttcgaactggcgttgggcgccgcaggctacgatccgcggaacgttcagcgtttccgtagcgagaacaaccgcgccgatgcccagggcgtcgcctctttgtgcgcacagatactgtccgcccagacccggcccaccgtgctcttcgtggagaccgacgacttcgccatcacactgatcgcggcactgcaacaacgcggcatccaggtgccacgggacatctcggtcatcggattcgacgacaatgcggcctccgaactggtgggcctggtaaccttccatcaggatgcactcgacgacgcgcgccttgcggcctcgaagctcctggacatactcaacggcagacagctggccgaagcatattcagggctaatacccaaaatatgtgtcttttgccgggcgtgttggggtggtttagtgtcctgcccagcctttgcggatgtgtagggatccgttttggtatgaagtgtcccaggttttgttccgtttgagtagatgggaaaatctggattatgcctaagaaatttgatcaggatgcgaaggatcgtgtggttcgtcttgttgaggatcgggttcttgcggagaatttgtccttgcgggaagcgtgtcaggtggttgcgccaaggcttggtgtttcctggcatactgctcgccagtgggtgcagcgctctcgtcgtgagggtcgtgttcaccgcctagaggaggacgtgattgttgagaatgctaggttgcggcgtgagaatcagcagctgcgtgatacgaacgagttactcaaagcggcgtcggcttttttcgcgtcagaactcgacccgcaacgtcggaaatgatcgctttcattgaccggtacagggatcatttttcggtcgagttcatttgcgcgacgttgaatgttcatcgtgagggtggtttcattacctctcgtggcctcggcaatccaaatctcgtggggtaagtgctcgcgctttgcgtgatgtggttgttattgagcggatcaaacagatacaccgtgataattacagcgtttatgggatacgcaagatgtagttggaaatcctatagatttccctaccatttccttggcttcaccaatacgagccagctcgatattgggttcggcctgcgttacggtggcatgctcttcgccgtgagggtatcagtattgacctgaagcaaacagctcgattgatgcgtctagcaggtgtgagagggaagatgaagggcaaatgcccgataactacccggaaagccggtagggaagatacccgtcctgatttggtaaagcgtgactttagagcgctagccccgaatcgtttgtgggtagtagatattacctatgttcgcacagtcaagggatttgtgtatgcggcgttcgtaactgacgtgttttcccgcaagattgttggttgggcgctatcggattcgatgcgtacgaaatctctaccgttgcaggcactcaatcaggcggtattgtcagctaaggaaactgcgggtctggtacatcattcagatcatggatcccaatacgtaagcatcgtctataacgacacgctcaccaatgccgggattagaccctcaaccggaaccattggtgattcttacgataacgcgatagcagaaaacgttaacggctcatataaaaataagctcatccacacccgccggtggaacaacgtaatagaggtagaaatcgcgacatttcaatgggtgtcatggtggaacgaacaccgcctccaccaagcgctaagctaccgcacacccagagaaatcgagaccgaatattggggaaaacacaaacaccaagtaataatagaaaacaaggcaaacgcctaggaacaaaacccaggacagttcaaacacgcccggaaaaagacacatatttgggtattagcccgttacacttaacaatcaattcccgttttcaagggggaagactcacatctcaaggagtagagacaatggggactaattcaaaagcttcaatgaaacccgcagcatccttcgaaccaaagaatcctggtttatggacctatgtagcatttacactcgctaacctaggtctgtgcatcgtctacggatcggcattgcaagttttacttgctacgcaagttgacgcgattgtaggaccagaaaatcgggtgggacagcttgctattgtaactagcgttggcgctgtatcttcaatgattgctcagcctgttgcagggtggatagcggataaaacacatgtacgctttggaaagcgtaatttttggatttttattggtggtatttgctctctcttcgtattatttccattagctttcagcaacagtgtttggatgattacgcttctttgggcggcttgcatgtggccacttaacaccattcaagttaatctcagcgctttcatcccagagcgcaccccgattaatcgcaggggtctcatgtctggcgtgatgggagtcgcaagatacggaggtatgaccattggagtcattattgtcggtcaagtcgcctctaccattccttcttatataattgttggagttacatgcgcactaactgcaatgctttattccttcaccactaaagatttatctttggctgaacgtcaagaggcaatcgctactgattcagataagtccccttcggaggtgaacagaggaaagaacgttttattcacctcagccgcacacgatttttggctcgcattcgcatcaagattctgcgtgattggctcatatttccttgtgaccggatacatgctgtatatgctgcaggactatattggctacggggatcaaaccctggttgctgcagctgcaggagtgggcatcgtcaccgccgttataacaattggaaacttagtatgttctgttctgggcggtatgctctcagatcgcctaggtaaaatgaaaatttttattgtgggtgccgccgcactatttgcggtccctgctatccttatgtatttttttccgtcatggaaaatgttactagtttctgcagctttaatcggcatcggatttggaacctataactcggttgaccaagcgcttgtcgcacgcgtgctgccgtcgaaggagactgcagcgagagatttaggcattattaactttgctgatgctggaccacagactgttgcgcctactattgctgccggtattgttgcttttacaggcgactatggagtcatcttccttgctatgggattcttctgtgtaattggagcagtaatcgctctacgtattaggggtgtggattaaaagcctgggtatattttaaggggaattattattgcaatctatccaattatctaaggaactctcgatacttaaaaactaatgtaagcagaatcctgagagccagggaaaaatatagctggtttcaaatggatgaatcctactgggttttgttccgcttcttatacaagggtcggttgactggctcggtgttgattatagcttgcgataatctcctctgggtagcgtagcctaggggttcgtggaggcggtggttgttccaccagtacacccggttcagggtttcccactcgatttggctacacgagcgccaagtgcaacagtagattaactgagccttgtttagtccgcctacggttcggcttggcgttatcgtaagaatcgccgacgctgccagtagaggactttacaccgtagtcggcaagtttttcatggtatctgatataaatgtattccgatcagtgactgctatggcgaatcggatcttttagatttaccctggcgcagtattcgtgtttaaacacaccatttttagagctcccactaaaacaggggtggaagggcagcccacagggatctgcttttttatattcattctctcttagctacccctagaaacagctaagctactaatattcgctggtgggacaggcgagtcagccgactaccccgccagtgataaagatcggagaagtaatgaagtttgtccttgctccagactcgttcaagggaaccatgagcgctgccacggtcgccgctaccatgagcagcggcgttcgcgacgttttccccgatgccgaatgtgtcgaggtgcccatggctgacggtggggaaggtaccgcccgatccttagttgctgcactcggcggtgaaatgcgttcggctcaagtagccgatgcattagggcgccctaggcccgcacacttcggatggattgcagcaagaatgctcgcagtcgtcgaaatcgcagaagctgccggtatcgaacatttagctttagaagagttagatcctcatcaagccactactgcgggcgtagggcagctgctcaatcagatacttgagctttcccccactagcctgattgttggtttaggtggctctgccactaacgatggtggctggggaatggcgcaggagttgggagcagttgctaaaaatagctccggtgacctcatcgatagctgcccactagccttagctgatgctgccagcctagatatcagcaacctcagtaaacgttggcaaaaaataacggtcacccttgcttgcgatgtcgataacccgctcaccggagaaagaggtgccaccgcggttttcggcccccaaaagggggtgcagcctgaagaaatcgccatatttgatgcagctttagcgcaatggggaaagcttttagataaagctagtggtcatcccgtaagtgaaactcccggcgcgggagccgcaggcggcttaggggcagcttttatggcattgttaggcgcaaaaccgcaaagcggggtcaacgtggtaatcgatgccgtcaatctagaggatcagctagccggggcagactttgttttcactggagaaggcgccatggatttccaaactaaattcggtaaaaccccctggggagttatgctcactgcccgcaaacataacattcctactatcgcattcaccggcaatttaggacgcaacgcagagtcactacacgaaaacggctttgccgccatcgtcccgaccgtacgcgaagtagggagcttaaccgaggctctcgaaaaagctcagtcatcgctgcgtgaatcagtgcgtatgacctgccggatacttgctgcgccaactttcccgcgtgactgaataataaaaacggatagggtgcatttacgggaaaccagcaagatccttccgcttttctagcgcgctgataattttagagaatgactaataaaaataagctatcccccgaagatgcgagaaaatttattaatgacgacccctggaactggctgcctggcaggcattgctcctctgttcgcaagcgatgctcttctgttcacttgggtgaagaagaaggcattcgtattttaagagctcgcgagcaagccgctctgactcccgtctcgccagaacagattgctaactatgcgaatgagtttctagctgccttagggattccggaagttgaaacccccagatttgcttttccacctggactaaccgatgacgaactggaccggtatctagaggaaaatctgtacgaaccaataagtgcctcgggaggaaatcgtaaggacttggtttggatgaaattcaccgaccaaggttttctgggggtggtagcggcaagtgccgacatcaattttgacattcgaaaagacggagaaaccgacctaggaaaacgaaccgtagcaggaataatcgttcatggactcaagcaaacgtgggatagaagcttcgtgctagcgtttcctctcaaatcaataccagaagatttgacatgcagtggcatagaaaccggcatcggaaactatctgatcagccaggatgtcccgatattggactattactcccacaggtacttctagatcccaggcgcgacggtcagcctgcccaacagtggggttcttccccttaatcgggaaaacaccaggatcacatcctggctacggggcgacaattattctcgcgtggagccgactatcggactcgaaccgatgacctgctgtttacaagacagctgctctaccaactgagctaagtcggcgggtacgtaacccgtacagagggcgcgccgcgcgcgaagcgtccgcaacccttacgaaaccagcgcatcgggtaggtatcaagtacccgtagccctcgcctcgcgtcctcgaaaatgaagacgccctttagtttgtcacggctttagtaaatgaacaaaaccgcagctagttggcacccggttcttatggttttctgggcagctaaaagatagctctcacccagccacagcgggctaaaacctggccgagaacaggtccctgcctagctagcagtccccctgacctatttcttaccgagcagcagatcctcgttaaaagttccgtcctggttaatcggattgtcaaccaacttcgcattggaggcaaacatcggggttcctatctgctgggattgcttaccagcagcatccgcccactgtttttgccacttctccagcagcgccgattggggttctgccttgaaggagttaatgatctcgtctttaaccccaaccttcttggcaactttcttgattttttctagcgacttagccggatcagccataatcgtggagttaccctgatccttccaaccagcgtcctcacctttagcgaacatcaccccatatccggcatcgatcaacgcttgatggaactccagcgttttctctggctgagctgcagccacctgcatagaggcattcccggcgataatcgtccacggcagtgcgtgagtagccactggatgcagcaccagattagctttaccgtccttagcaaaagccaggatcttctcccccaactgatgttctaggttcagacaggcggggcagccataggaaaaccacatctcaatagtgggaaccccagcggtagctttatatacgcccttttggccaatcaaaataccctgcgccgcatcaacggcctcctgaccagagagggcagcaactttttccgggcgctgaccggaaagcaccgcgcctgtattcccctgcgcttctccatttccgctctgcgcaaccaggtatccggcgagagccaccgcggccaccactagcaccgcaactatcgcgatcgctacccgttttccggtttgcttacggcgcgccgcttcccgctgtgcttctacctgtttccaaaccttttcttgtcgcttttgcgcggcttgagatgaggtcttaatttttccggtctgaaacttgccttttttctgtgccattgctttccgctactactttcctgcgactttccagttttctgtttcaagcataaacgaggacgcgcctagctcccagcctatccgggctttgatcaccgcaacccgggctaatcaggctaccaaaggaaatttaccaccatatattcggcgccgatgctgactgccagtgccactaccccccaaaacagacgggcaccggctcccccgatcaggcgcaccatagagccaaaccccactctgaaggaacgagaaaaaaacgccactatcgtgccaaacagcgaatacgccaggtagagcagcacccgataaaccgcctgttgttcgcgccagccctcgggcaaaatccgctgtgcaggttccaataagagcacatccccgtactctcctattagggtcacgcccacccccaccagtatggtcaccactattactccatgtagcggcgcccataatggttgggctttgagcgccgcactgggcggagtaaccattcccgaagccagttgcgcatctcgcatccgcgccctaaacgccccaaacagaccgcaaaaggccactaaggcagtcagaactaccgtacccagggatactgtcagcggtgcatgcagattattttttagcgcaaatacttcggtagccagcgataaggacagcattaagaccaaacaagacaaccaggcgttaggtaacttattggggatatagcgcggctcccactgcgcaggcaccccgccaacccctccggcaactgcaccgtagccaggcgccgacggctgcacccccggatctacgccgccccccggatagttacttgcatagttacccgcggacgccacctgataaccggccggactgccactttcggggggagccggaggataaagccgagtagcttgacctgaagctgagggcgcggaactgggctctgattcccctcggtgttgagaagcaggcggaaaactgggaggaggcggccccggatcggctgcaccaacattcgctgtgtccaaagctgcggtccccgcccgcgcaaaaccagaatcatccgtcaggtaagaatcttccggcaagtaatcagcgggatctttcccctcattaaccgccctaaaagccgcgattagctggtcgggagttgctcgccgctccgggtctacctggaaaccagcctcaaaaactcgctgtagcgactgcggcaattccgataggtcagcttgaccagtatttatgcgccctaaaactacttcgataggaccagaaccaaagggcggacggccactgatgcaatagagcaacacacacagccaagcccaccagtcatcgcgcgggcgcgcatcctcgccctgaataagttgcggagaaatatatccgggagttcccgtgaccagcccggtcgcggttaaacgttccgcccccggagtttgggaaatcccaaaatcaatcaacaccggcccttgcttcgagatcatgatattggcgggtttcacgtcccgatgcaccaccccggcgctgtgcagttcccgcaaaatccgtgccagccactgcgccaggtcaatcaaatccggtaaatcccaggtgccgaattcgctcacatcctggtcgatagtcacccctttgatcagctccatagccacgtaaggggtttcgccctgggtatttacctcgaaaactttcgctacccccgaggagctaacgcggttaatcgcgtccgcctcccgctgcagacgtttgcgggcattggggtcgctggcaatctgcggatgcaaaaacttcaaggcaacttggcgaccatcaggggcttcggcctggtagaccgaggccattcccccggcgcccaaggccttaatcaccttgtatccgccaatttcttgcgcgaccactgtctccctaactgttaagcaactctctttagctgattttagctaactaggctcgcacattcccaaccacctatgccacaattgtcctagcaaaagtagaaggaggaggaatagtgcccgctatgcaaaaacttcgagtcactactacggggacctcttcgttctattctttgattccttccctaccctggtcactgcctctagaagaatggccaaatgagctattagcagcactcccacgtggtatttctcgccacgtagtgcgcttcatccagtctgagggcgaaatttacgcggtaaaagagatttctgagcgcgatgcattgcacgaataccatatgctgctacagctgcatagaaaagaactacctgccgtgtcggtggcggcagtagtcgccggacgcaaggacaaaaacggggaagaactacccgccgctctaatcaccaatcacctgaagtattccctgccctaccgggtgctgctgtcaaaacagctctctcaaggcaatctcgatcgcgtccttgattctctagttgccctgctggtgcgcctgcacttatccggtttttactggggggatgtttccttatcgaacactcttttccgccgcgacgccggcacctacgccgcctacctggtagatgcggaaactgggcgcttttacgacaatatttcggatcgctcccgcgaatacgatgtctccctaggcgccatgaatatcatcggggaactgatggatttgcaggccggaggcctggtagacgaggacttcgatccgactatagtcggcgactacctggaaaaaagctaccacgccctctggaatgatttaaccggatccgagcggattcccgccgacgagatatggcgagtaggggcgcgtgccgacaggctgggacagctaggtttcgatattggccaagtagagattgagtccgatgaggacggggatttcttacgtttcaccccgcgagtcgtagaggccgggcatttccaacgcctggtaaaagatttaaccggcctggaagtccaagaggaacaggcaaaacgtatctacaccgatattttgacctataaacggcgcaagaaacttgataaaactcccctgcgacaggtggccaatacctggatggatcgggtgtatctgcccaccataaacgcgattcccgctgagctgcgctcaaaactagagccggcacaaatcttccatgaagttttggaacaccgctggttcatgtccgaaaaagctaggcgccacgtgcatacccgcaaagccgtaaaagactatatccgcactcagttggcggctcgcccggatgaacaagtagtccttccgatgccgctgactgcgaccgccgatatttctgattttctagacccggaaagaaaataactgcctttattgtggccagcgcccaggctagtagtgacagacttaggtggcatacatcccggatatcggtgccgataaaccagaaacctgctgctagtgacgaccgtgacggcgccctactactactaatcctccctgaggtaaaagacgatcaggagacatcgactcggaaactgccgctaaggaaatcgtgaatactgccggctgcctgttggtaagctctatgcgtcccccatcggcttcaattagatctttagccagtgccagaccaatcccgctggagccatgaccgctaactccccgccggaaaatatcgggagcgatatcttcgctcacgccctcgccctcgtcagagacctcgacaaagatggagcgcgaggagactccttcgcgggtagaaaccgtgaccgtacccgccccatatttcaaagaattttccaccaaagtggcaatagcctgcgaaagcgaagagggtgtcgccaggggcaaacgatcggttacttggttgtcaaacacaatgcggcgccccactgccgtgaactgtggctcccactcatcccgctgttgacggaaaatttcctccattttcactgcttgggtatggccatgactagactgctgagcccgtttcttcaagtcttcgaccacttgggtaatgcgttctacctgttccaaacaggcttccgcctcggtgcgtacttcttcgtcatcgcttagatattggatttcttctatccgcatggaaagggcggtcaagggagtgcgtaactggtgagtaacatccgaggcaaactggcgttccttggcgatcctgcccacgattctttcaccggagcgagaaagttcctcgctgaccaggtcgatctcctcgattccagtaggctctatccgggcttggaccgcaccagaacccacctgttctgcctgagcagaaagatatattaggggcgctgccaggcgccttgaaccccggaaggcaaaaatcgtgccagcacccaatgccactgctccgcagatcagcaccgcgcagaccgcgcccaccgacgaccagatcaccggtaccgccgaagaacggatagaaacataaagaccgccagcactgcgggcatgggaatacagttgccattcagtgtcgacggaaccagaatcaaaaatacgcttttcccgctggtcaatacggatttgggattcgggagcatagacacgtcgccactgcgtaaccgcctggcgagtacgatccagatcgtgaaccccgatctgatccaagtaacgcgaaagggtcaccgcctggttatcctgagccgtctggctggactgccacacgtaggagggcgccaaaatcgccaaaggtagtcccagtaaagtcagcgatactaacactgactggaaaaccattaacagcgcacggcggcgcatagccggctactttcgttcagtctcgaaacggaagcccattccccgcacagtagaaatgtagtacggataggcagcgtcatcgcccagtttccgtcgcaaccaggaaatatgcatatccaaagtcttggttgaccccgcgggatccgaaccccaaacttcctgcatgattacctggcgaggaactacgttgcccgcctctttaatcagaatgcgtaacaggtcaaactctttggcagtcagttgtagttcccggccattttggaaagcgcggtgagcagaaacatcaatcttgatgtcctgtgcctctaaggtgtcgtcttggaagtcgctgccagcgcggcgtaaaagagcgcgcacccgagccaaaagttctgccaagcggaaaggcttagttacatagtcgtccgcacccgcgtctagaccaaccaccatgtcgacttcatcggtgcgagcagttagcaccagaatcggtactgaagatccttgggagcgaatctcccgcgccacgtctaacccatccatatcaggcagacccagatccagtatcaccaggtcagcaccaattatttcgccgagagccccgcggccggtgccatgagcgcgcacctcgtagccttcccgtcccagcgcacgtgccagaggttcggagattgccggatcgtcttcaacaagtaaaactgtagtcatgttcccatagtaaactataaaaatctttatcgccagcgggcgtgtactttagatagttttactatttctttactggcggggaagccatctctaaggtactgtggcgcatcagcggctgggctgcgccttcagatttaccgcgggtaagcaaccaggcttcgacctcgccgaggccttggagagcttgagtttctgccgggcttaccgcgaaaaacccttgattatccaactcttttaactgtttggcagaggcggcatccatcaggatttgcccgcggggagcgatatctaccaggcgagaggccagattgaccgggggaccaaaaatatcgccggaacgggaaactacccgcccatgaaccagcgaagcccgcaccggttgcagctccggctcctttttcaaccgctccacgattgcacacacgatatcggccgccaccaacagttcatcggcaacaaacagaaccgcatcccccagggtttttaccacccgccctccgcgagtagtaaccacgtcgcgacaggccatttcaaaagtttgcaccatatccgcgagcgctgaccccgtcatagtggaagagcggcgggtataggcaaccatatctacgaaccccatacaccgatctaggggataagaatcggaagcagtttctttcccctcccgcatctctacttctcggttggtgttaagcagtagatacgccatttgcctgcgccaggcatagcccagttgggattgcaaaagatctatgtattgatcaatttcatcgagggctactaggcgcgccttggtgtcatccagacccatgcggtcttgaaaatcagtcacaatcgcctctagctgccacagcgccagccgctcggccaaataggattgtgcccgcaatagtgaagttacggcaccgggtgaaagcgcgccctcgctaatctcttgaatccagcccttgaccgcttgcgcgtcttgttcagtgaacatataggcgtccggatctgccttgggaaagccacaggaagtccagaaaccttctacgaccttcatctcgactcccaaatgatctgccatctcccgcatagtcatagtgggagcgcccccgattagtttccacaccgggcgcatcacggtattgcgcgcaatttgggcagcagacatggattcactcaccctacaaccttaaggtgaacagcctcactttttccagcagaccaggcagtgccacccgctttggcagaaacttttctttttcacggcttcgctacctcgatttgctccggtagcactgtttttccataggttttattccctgccgccattgtgccttttaaaatagaggctatgactgatcacttagtcttggcctccgcctctagcgcgcgggtaaaagtgctgaccggggcgggtatcacccccttggtttgggcagccgatattgatgaggacgcggtgcgcgccaccttggctaacgctgcgccacccgaggtagttacggctttagcccaggcgaaagcccgacacatagcccagctaataaccaaaaccagcaggcgtcgccgagaatgtttgcaactcaaccagaccactttgaacgcacttgccgggctagaaacaggtgagcgcctggcggtagtgggatgcgattccatgttgctgctaaacggcaaattacgaggtaaaccccatagtctcgagcgcgccctcgctcagattcatgaactttccggggcgtccccggtgcttttcaccggccactgcgcgatcgccctcacccgcactaatagtggctttacctgggaaaaagaggtgcagggccactcggaggccactctgtatttcagcgaaatcagcaatagagaggcgcgcgcctacgcggatagcaaagaacctttggaagtagcgggcggttttaccattgatggattgggaggagcctttattgactctattaagggcgacccacatggcattattggaatttctttgccattagtgcgtaaactattaaccgaacttggctttttttggccaaatttatggaagggcttaccaaatcaagccccaacagataaggttgagttatgagtgaacgaaaagcacgcggggtaggcctcgcaaccgtcagcgaaagtggtcaaaccctggacgtttggtatccgcgtccttacctgggtgaccagccaaatgaaaccgatcaggaattaatccacaaactaagtcagattgaagggcgcgacgaggggcgtggggttaaccgcacggtcaccgtagtcactatcgatttagacgagtccgccagttcgactgccgacgcctacttgcgtctgcatctactgtcccaccgcctagtaaagcccaacaccatcaacttggatggaatttttgcgcggcttcctaccgttgcctggacaacggaaggtccctgcgcggtcgaggacttcgaaaatacccgtatgcggatgcgtctgggttacggacacccgattcacctgctcagcgtggataagttccccccaatggtgaactacattatcccctccggagtgcgcattgctgatggcgcgaaagttcgtctcggagcctatctgtcaccgggcaccaccgtgatgcacgcggctttcgttaacttcaatgccggcaccttaggagcctgcctgattgaaggacgggttgcacaaggggtagttatcgatgacggctctgatattggaggcggcgcctctaccgaaagcacgctctcaggtgaaaccgggcaacagatttccctagggaaacgctgcttgctgggtgccaactctgggctaggaatcgccctcggcgatgactgcatggttgcccctggcttgaacctgactgccagcaccaaagtttcggtgctcccccacgcgggggtggcgccctccgccgaaggttacttcgcggagccagtagtggttcccgcctccgagctttctggagcttcggacgtgatcttccgccgcaactcccaatcgggtcgggttgaagccctgccgcgcgctggcaaagaaatcaagctggcgaccgccgcccgcatcaacccgtaaaatcaacaatccggatttttccggagccaagtaataatccgcgtaccgatcccggtgcgcggatttttacactcccgccgcccgcagcctcgctgctccacgctcgggtctggctcgcttacctcgttgagcgattaagcgcggggttagattgttatcccggtacgggttgggttgtaaaagcgctcgggggaccccggtgagccttgcttcgctcggctcaagccccctctcgcatcttttacagcccaacccttgtgcgcgggggattagttttatccgagcaggctaggtgggcgtaaaacttggaaacgtagctacgtttccaagtttttgggcaggaggaaaaactaatcccccgcgctggctacgctatcgattctgcttacgagaattacgactggtggcgccaggctgcggaacgctgactggcgacccaagcagcgacctgcgtgcggcgctgcaaccccattttggctagtagcgaggtgatatggttcttcactgtcttttcggcgacaccgagcttttcgccgatttcgcggttagacagcccatcgccgattaggtttaagactttgcgttctgccggggtcagattcgcggtgggatcctcgttgccggcgcggcggcgggtaacggtgcgttcatcaagcaagactcgaccgcctactactgcccgaatcacgtcggtgatttcggctccccgcaccgtctttaacacataggctttagctcctgcctgcaaggattccgctaaagcatcatcgtcatcaaagctagtgagcacgatcgccaaagacttgggggaaacctcacgcagctgtttcattacgtcaatgccggtgccatcgggcatttgtagatccaccagcaccacatcggggcgcaccagttcggcgcggcgcaccgcgtcctcaactgttcccgcctcagctactacctccataccggcagtgcggtctatgatttcggcaatcccgcgacgcacgatttcgtggtcgtcaataatcattacccgagtggacggttcttctgtctgcgattgctgaatgttcacgccttgattctacctaatcctggtgcaaaggaaacatagctttcacaaagtagtcagctagcccttaatcctatccgggagctactgaccccccgctggagcaggcgccaggggcaagtggtcagaggcgtgctattgaccctattttttcagttcctggcactggggacagtaggtggcgttacgccctgactgttgcagtttttttaaggtggtgccgcaaaccttacaaggctcgccgccgcgtccataaacttttagttcctgctcgaaataaccggggtttccactggtgtctacatagagttcatcgaaagaagttccgccctgtttaatggcggctttcatgatcttgcccgataccttaaatatttcctcaatccgttcctcggttagggttttagcgctttgcgccggactgatacgggcagcaaacaaggtttcatctgcataaatattcccgatcccggatacgagcttttggtctaggagggagtgcttaatcgagctcttacgctgatgaatcttctcggcgacctccttgaaatctgcgtgcggatcaagtacatcccgggctacgtttacttccacattgcggggaatcaaatgagattcagcgccgatacctgccggtttcttgtccttggtttccactagtggctcaaccaccatgcgaccgaaagtgcgctggtcaacaaaactgacggttctgccatcttttagggttaggcgcacccgtaaatgtccttgattccggcgggatagttcaattttgggtttattgattagtaactgcccggacattcccagatgaataaccagggaatacagggtttgctttccctcttcatcctcacctaatagccacaaaaactttccgcgacgcacggcgttcgttattgtccatccctctaaagcctcgctaaagcgcttctcatcctgcccccgcagagagccgggaaaaaatacctcaactttttctatctgcgcccctattagctgctgttcgaggccgcggcgtactacctcaacctcaggtaattctggcataaacagttcccctcaaatctactgtcgtttctcaatccttaaatgtaaggtcatttccttctaaaagcctatcggcgtagtcacgccatgttcctctcgcagcgtcattaccgcttgtctggcggcttcatgttcggccaccttcttagaacgacctttcccggaaccaatttcccgttctccgattagggctcgcgccgtaaaacggcgattatggtcgggaccgataccttctactgaaaactctacattatgaacccctaactgaccagtaagttcttgcaaagtagttttccagtccatacctgccccccgctcgagggcatgttctaagaggtcttgaagcagattttctactacctttcgagtagtttccagaccgtggctcagataagttgccccgatcagggcttctaccgtgtcagagagaatagagtccttttcgcgtcctccggtcttatcttctccgcgccctagcaaaataaattccccgagattaatatcgcgggcaaccttggctaaagccggttgggaaacagtggctgaacgcattttcgccaaatgcccctccgggtgagaaggataggtacggtaaagactttcggtgacaatcaactgtagaactgcgtcacccaggaactctaggcgctcattattgggaagatcgtcttgttcatgagcgaaagaacggtgagttaaagccagcaccaccatatcggggtctagctcgatcccccatctggttagcagcttcgctaggtcttgcgaaccgcgactcatgcgttcttctctccctcttggtcaaataacccactcagcgccgaccagcgcggatctatcttttcatgatggtgaccggcttcggcgtgtgccaacgcgattccacagtcggggcaaagccccaggcaatcagggctacaaagcaccgaatagggaatctgcggcacaatggcgtctatcaatagcggctctaaatctacccgagaatcagggcacacctgataggactcatccagatcagcatacacgcttgagtcgtcactcacctcatttagcaggtgcgcaagctcatctggatagtaatagattcgactcaaagaaaattcgattgcttcttctacgggttccaggcagcgcacgcactctcctttagcgagagcacacccgctgacactgatggacacgccctcggaaatcgctaccgcgagcacctgtaaatccagggtttccccggccggaaccgccatatcgtcagtgccgatgggggcaggtaactgcacctgtacctgccaagatttactgtcgccttcaccggatcctaaactggctaaatccagcgggataacggccttttttatttgtttcatgaccctcaccctaggcggaattttcctccggcgctaacagacttaactaagctggttaaaactgagggcgctcctggcgggaaaactgagcgcgccccttacgagtttgctcagcgattgcccccagcaaatcttctagctgcgtcaaagaatcattaacgtactggtcagattgattcataaaatcgctggcttccccgcgcgcagtattaaccgtttccttagcaacctgctgagcttcccggtaaacgttctcttgagaaaccatttgatctgcgcgttgccgagcttcctgcaaaatctgcgcggcttgctccttcgcctgggcaacagtttcttctgcctgggcgctggcgtgagcaatcgccgactcggcctgctgattggcttctgcaaccgtttgctgggcttgctcatcggcctgggcaatagttttctctgcgctctggttagcttctttagtgacccgctcggcctcggcgcgggcatcagaaatagtctgctcggcctcctcgtcggcggcatctagcactttattggcatcggcgacgattcgatctgcattaaccaggtcagccggtagcgccgcgcgcgcattttcgagcagctccaccccttcggcctggttaatcattaccgaagcggaaaagggaacgctgcgtccctcctcgatcaattcggtgaggcggtcaagtactgcaatcacatctgaaggtgcgtactgcggttcttcctgggcttccataatcttccttcctgttttaggcttctggattcaaagagtggtcgggggcagtgttattttccgcggatgcatcgaagactacttgcagcgcctgggctacttcgggaggaacgaatccagacacatctcccccataggcggcgatttctttaaccacggaggaagaaatcagtgcattttccggggaggtgggaatcaagatcgtatcgataccggaaagttggcggttggcgaacgcctgggtcatttcactgtcagtgtctttagagttgcgaatacctttcactagcgccactgccccatagcgggtcgccaggtcacaagccagaccttcccaggtaactgcctgcacattcggcaagtctgcggtggcttgagtaatgaattcttcgcgcttggcggcctcaaaaagatagtttttctgggagttttttgctaccgccacgattacgcgctcaaaaatgtgggctgcgcgggtgatcacgtccaaatgaccataggtcaaggggtcgtaggatccgacgcagacaacagtactcatgaatactaaaatacctgcaagggttccctggggaggacttcccacgcggagggagaggaaactgagcttgtccgaactcttttaggcggcaccgagggcggggcgcaggaagtaaacggcactttccccgtagagtttgcgggcttcttcttcccaatcatcttcgccccagtccggggcttcatcgcgagccgaacgctcgatcactatccaggcatcagggtcacaaagggggagcagctgcgctagcacttctaagatttccgagttcttcatattgtagggaggatcgataaaaaccagttcccattggggatttggctcggttcctttccaacgcgaagccaagaaagttagggcggactgcacatatagtttcgcttccgcaaaaaccggagatgccgcctggttcttgcggattactgtggccgcgcttggtgcacgatcaaccaggtctaggctgagggcgccgcgcgagagagattcaaagccataggctcccgaaccggcaaaaagatccagaacacaggcatcttccgtggctccccgagattgcagagccgagaaaattgcctcccgaactcggtcttgagtagggcgggtgccggaagagggtacggctagctgagtgcctcgggcagttccagctattattcgcgtcatgattacaccctaaccctagcgaagttcacaaaacagcgactttcgatattacattcaagcattccgttacccgcgctctaaaaattcctgttcttcttcgctgattcgccgggcaatcgcctcttttaatatttgatggctctttagttccgggtctgccgttaccagcgtcttagcatcttggcgcgcctgggaaatcactgcttcatccgccagcaaatccaagattttcaacgaggaggcgcgtccagactggctttctcctaaaatgttcccactttcccgcaacttgagatcgacagcggccagccggaaaccatcggtagtttcggtgaacgcttgcagacggttgctggctagagtatcgggttgtgcccctgaccaaaccaaacacactcccccaagtttgccgcgtcctatgcgtccccgcagctgatgcaactgggcaagaccaaaacggtcggcatctaggattaccatcatggttgcctggggaacatccacccccacttcgataacggtggtggccaccaacaacggggttttcccgctagtaaaatccgccatcgcccggtctttttcttccgctgacatttgtccatgcagaaccccgatttcgattccttttagcgccgggagcgaccgcaggtggctgacggtatcactgacattggcgatggatcctgccgcatcctcgccctcttcaccgccagccccatcttcattttgggagccaggattgattgccggacacaccacaaaaactcggtgaccggccacgatttcttcggcggcgcgctgccaagtgcgcgctgtccaggtgcgattcgcggtatctacccggaaagtttctactttcgccctcccgggaggcattccctttaaagtcagtaaatctaagtccccaaaagaggtcatcgccaccgatcgaggtatcggagtagcggtcatcaccaataggtggggagttcccgattcgccctgtcgcagccggtcacgctgacgtaccccgaacttatgttgctcatcgataaccaccacccccggggaagtgagcatcacccgctcagaaagcaaagcatgagttcccacaatcaacgctggttgcccagtttttaacgcatccaaagtacggcgcttttccgcagtggacatagaggaggtaagccgataaatcgggatgccctctgtcccccgtaaagtaaaccctcctggttgggcgtattcacctaaaagactggtgagagtagaaaaatgctgatgcaccaagacctcggtgggagccatgaagattccttgccgcccgccatctactgccagcaacatcgccagcaatgacaccacagttttaccggaacccacatccccttgtagcagcaagttcatgggatgaggtgactgtaaccgctcctctatatcagctagggcttgctgctggaagtcggttagggcaaaaggtagcgaggaggcgacccgctcggtaaatcctccgggaacctcttttagaatgggtgcatccgcagcgagttcttgtcgccgctccgctagcgccgcctgcaacacgaaggcttcctcgtagcgaaaacgactacgcgccgcctcataatctgcgcgagtttgggggcgatgaatctgttctaaagccgcatttatctctaataatccctgttctttgcggatttcctcgggtaaaggatcgggcaggggacgaaactttagctgatctaaaaccaccgcaatcgctttttgggtggtccatgtgggtagcccggccttcgcaggataaatcggttctggccgctgagcctgcactttagctgcctggttactggcggcatctagattttcgtcgcttacttcctgataggaggggtgagacaactgtaggcgtcctcgatataggctggggcgaccagaaaacagtttcgtttgtcccacctgcatttgcgaggacatccaggtgattaggtgctggctttttgcccaaaaaaccgcatccatcaggttttccccatcgcttagctgcagggaaagcatccattttccaccgcgagtacgccgccgtgaagaatctgcgatttgggcgattactgactgctcttcccccaaggtgagttgcgggaaagaagtaagctcccccagttcgtgatagcgccgaggaaagaagtacaacagctcaacagtggtttcaagcccgaactttttatctaacttccccgctactcgccctaggattttctttaaaggctccccggctacctgactttcctgcgcgttcacgaagacaatacccccaccaaggtgtcgccgctttgcccgccactgattaactcaatccggattccgggagccccttgcgaaagcgcgttttggatgcgggcaatcagatccgggtcctcccctttgcgaatcaggatacgcgcctgaacatcatcggcggtcaccgaagatgccagcagatcaaaggatgtttcggaggatactgtccatgtgcgttgggtagctaaagcatcgaaggtgcgcgagcgctgcaactggatcaggtcaggggtttcaatggctgaagaaactacctggcagcaggcgcgggttacttctaatacttgcaggtcatcttgggtgggagccaccatcacttcaatcccttgatttttggcgggacgtaccaggtttgctagttctgccgcgctcacctggtcacagggcagcacttggacgacctcttgctccatctcggcgattatcgggagtacttcctgaggaactccccggcgggaaagcactactgtggcacctaggttagctaaatctcccaccagtccgggagcagaagcataggctaaaaccgctggtctgattgggcggatagcgcgcgaggaatccaggctcaccaagttggagccagagggggtttcactttcaataggcagcggggggcgggctaaaatcatccccgatttttccggtaacaattcgattaccttccggggatgccggctgcgtactagcagcatccgcggtccgattcccagcatatcggcgcgaccggtaatcgccccatatactccgtttttctctagctccgcgcgcagtcgctgaacacgtgaattatcggcttccccgcgccaagttaacactagggagtgccttcgcgagggcgcaggcaaaccggggtgggaatccggaaccatatcgcgcaccatttgcaaactggtggctaccgccccctgctcttgttgattttcccgacaataggtttctaccattgccgctactagcagcatcaacactgccgctcgcgcatcggggcgcccatgattttcttctgccccttccactagagccacttggctagccatccaggcacgcgagagaatatcttcgattgacatttgctctggctgggtttctagctccgcgtttacctcctctatcagccccgataaagtgggcggatctaggcgctccacggcgggcaacaggcagcgggtaggacactggctgctagaacgcaacacttttaatagctgcaccggatttagaccgggggaactagccgcattggcagccgcactgcacagctcggacagcacgatcccaatcattccgctggctcccgctaaggcggcatcggcgatcgcttctaaaacccagctggcgtccctatctgcgcgagaaggcagtccggccacagtcaaagccaccttatcccaggtaagcagggtgtttgtgccggtatcggaatccagctcgctttgtagatccatagaatctagggcgctttgcgccgcctgcagcacttccccgctgacctttacccaatgccggatattacttcccgtgacttgcagatccagccgctcatcagattccaccgctttcgccacattttcccgtttgcccttcggccttggtttcgccggtttgggagccatttgcggtacttcaaagtcaagcagcccggttgtccctttcactggggtttccgcggttttctttccgcttttttttcgtttttcgctggaacgaggacgcggggtggtcttattgggttttaggctttccttagcctcaagggaatttttctcgtcccgtcggtcatggcttacatactctgaattggcagtaaccgggttttttgcccttgcggcgcgcgcgaaatctgcaaaagaaaacagatccgctaggggttcttcttcgcccactgccgcctccttcgcaaaaaactagttaagggtctgcgcctgcccgctctcatagtctaacgagtttttcagtgaagcctggcacaataaccacctggtacttggcggttgcgcttcgaatcagttaatctggtcgggttgccgatatctgggcaaacttacccagattcaaagaatacttgaaggagactatcgtggctgccacctgtgacatctgcggaaaaggccccggtttcgggaagagcgtttcgcactcccaccggcgcacgaaccgccgttttaacccgaacattcaaagcgtgcgcgccgttgttggtagtgcccgcaaacgcatgaatgtttgcaccaagtgcctgaaatctggacgggtaacccgctagtaacaggacgaatcggcgccgtctgcctctggcaggcggcgttatttttattttctctggaaagttctcctccctgagcaggggaagccatgtaaagttaaaagtgatttcgcatccaaatttagacaggcagaggattctcatgagccagaacagcccaaaccaatacggtaattttcctaataaccctggtcagcctccctctccgaataatccgaataattcgtttaagccgggaattccagatgggcaaaaccatcagatgcagccctacccaccccagccgggcagccaggctcagacctaccgcccccaaccaagcagccaaagcccgatgcctcctgccccaaatggcggcaactaccagtggaataactatggacaacctcagggacaacctttccccggacaaccagctcccggtaactaccagcaatatccgcctttccccggacaaccagttccgggcatggcctcccctatgccaaatcaagctttccagcagtacccgaatcaaaaatcgaaactggttgccggtctgctcggcatcttcttgggcggttttggggtgcataatttctacctgggaagaacggggagagcagttcttcagctagtaatcaccctgctttccttcggcatcgcagccatctggggctttattgagggcatcttaattttggcggcgaaaccgggatcttcttgggcggtcgatgctgaagggatacctctacgtgactaactagcgccgagccggttattactgactcccagcaccaagtttgcctacagggaaaactattgctgatcgttgttcaggctttaccatgtgagcaagttcaaaggccgccagagcgctttcagcttttaaagaggcctcctggtctgctagattaggtgttaaccgaccaggaaactggtacgaaagtggaggttttcccacctggatgctctcgggtatcgggtaagaacagatgctttaggcatctgcgcgttttttcgcagcctccgcaaaaccagcgggggcttttctttttaagtctggctcccaaaaatctcgagcaaggagcagctatcagcaacgagacacgcattaatgaacgcatccgggtgaaagaagtacgcctagttggccccagtggtgaacaggtaggggtagtccggatcgaggatgcattgcgcctagccacagaagctggcttggatctagtagaggtcgcgcctacggcgaaacctccagtttgtaagttgatggattacggcaagttcaagtacgaggccgcacaaaaggctcgtaacgctcgccgtaaccaagtgaactcccagctaaaagagattcgtttccgcctcaaaatcgatgatcacgattacgaaaccaagaaaggccacgtaatacggttcctcgaaggcggagacaaagtaaaagtcatgattatgtttcgcggacgtgaacagtcccgccccgagcttggcgtcaaacttttagagcgcctggccgaggaagtaaccgagatggctaccgtagaatctatgccccgtcaggacggacggaatatgactatggtgctggctcccacgaaacgtaaacatcacaccaaatcggatcagcgtcgtcgccgcgaccaacagcgcggcgaaactatgaaccgtcaacaacttaaggatgcccgtaaggctcgcagagctaaagaggctcaggaagctgaagccgcagcgaaagcgaaaaagtagggtcgtcctaaccgcctaagaaacaggcaaaaccaccggcgtgccggtagagaggaaaaacaatgccgaagatgaagacgcactccggtgcgaagaagcgcttccgccggactggaagcggcaaattgatgcgggaaaaggcgggcaaacgccacctgctagaacacaagtcttccaaactgacccgtcgcctcagccgtgatcaggtagtggcacccgccgatgccaagcgcgtaaataagctgctggctggcaacaagtaggcaaggagaggattaagagagatggcacgcgtaaaaagagcagttaatgccaagaagaaacgtcgcaccgtattggatcgcgcctccggttatcggggtcagcgttcccgcctgtaccgcaaggctaaagagcagctgctgcactcaggcgtttattcctacaatgatcgccgcaagcgcaagaatgatttccggaaactgtggattcagcggattaacgccgcttgccgcgcccaggatatgacctataaccggttcatccagggcctgcgcctagcagacatcgaagttgaccgccggatgctctccgaactagcggtttacgatattgacacctttaatcagctggtagacaaggcgaaagctgccctaccgaaggacgtaaacgctccggctgcttaataaaccgtcaagaaaagtcagctttttgcttaatctacgcctagacacgattgataatcctcgctcccagcgggtgcggacgctagtcaatctgtctaggcgtagttttcgtttaaaacaaggattactcctggtagaagggccacaggcctgcgcggagctactgcgtttctacccggacgcggttcgtgatgtttatcttgttaccgatgcaccctcccccgcgatccaggtggcgcgggaggcgctaggggttacttcctgggtgcatccggttacccggcaggtaatgaacctgttcgcgccctccgcacaaggaatcgccgccaccgccgatctttcgctgcttcctagcgaaaaacttccgtccccggatattttgaatgagggcgtgtgggtagtgtgcgcgcgagtgcaagaccccggtaatctgggcactattattcggattgccgatgcctgcggtctggcaggggtactggccttggaaggctgcgcagatccctctagtccgaaagttattcgcgccagcgccgggagcctgtttcaccttccggtttactccggcggctcccttgcttctttagcggggttgagcgcggaaaacgacggctacctggtggggctgtcgggatcagccgaaacagatctccctacttttactacttctgggatggtaactgccgcgccgttatttatctgcctgggtaatgaagcccgaggtttaagtagcgaggaaatcgccctctgtaatgaaaccatttctattcccatgtgggggcaagctgaatccctaaacgtagcgactgccgccgcgatcaccctgcacgccatcgccagtgcccgcactcactaaaagcaatccgccttaaatcgccctatccagggaaaatgacaaatatcatttctaaaaagtgacaaaccctgatggtatagcgccagattaaccgcgataatttgggtatgaaagaacaagcagaccccaacctatctacctccataaaggtagtggataaagaagcattaacaaatgctgccggaatagcagaaagttacgaaactacccggaaaagtagagaaaataaatcccttatttccgctaccccaaagccggcaatagcgactcaaaacctgacccaaacttttggcgcaatccgcgccctgaacaatataactttaactattcctgccggaaaagtaaccgccctgcttggaccaaatggagccggaaaatcaaccctaattgatttagctaccggactcaccaaaccaaaatccgggaacattaaagtattcggtttagatccgttgcgtgccgttcgctctggcaggataggagtcagtcagcaaagcggtacttttccggaaatactcacgattaaatccgccttacaactcctagcggcagcctggccaaaacatttgccaatagagcaattaatggagctttgcgatctgaataaaatagccaaacggaaaataaaaaagtgttccggcggagaagttcaacggcttaaacttgctttagcgctcctacctaatccggatttacttattcttgatgaagccaccaccggaatggatgtgaacgcaagagcagcgttttggcagattatgcaccacctagcccagcagaagcgcaccattgttttcgccacccactatttagcggaagccgaagattttgcgcacaatatagccatcctagatcacgggcagctggcagccagcggcagtcccgataagattcgctccttggcacgctcgcacctatcagccctattagcggagccctcactcaccggcgctcagcgcgccctcgccaaagtccaaggagggcgaaactggaatatctggttcgataacgagcgcatccatatagatggggctgaccttgatgatgcgttacgcaccctcgcccaattcgatgaagccacagatttcagcctgacccgggcatccttagatgaagcctttacccatatcacccaggaagcaaatcgttaagatgcctattgctaatacctactcgtccttaaaaaagagaaataccatgtcgaaaaataatgattttgctctaaagctaaaaaccgataataaaatgttaaaaatgctgaattttcccgcctcctctaaaagtcaatccccctataactcctggcggaatctgggattaattatgcggcgttgcttttttgtttgggtacatccgactactttaattctatttacttttatcccgatagcctgtttctcgattttcggtttagggcaggaatactcgaatatcgatttaggagaaaccacaattgccggatccatcatgtgcaatatgtgtcaatactcggtagtatttgtcgccgcctgtatcactgcccgtatcggcaccgaacaggcaaccggctggacgcgacaaatcgccctcaccccgataacttcccggctgtatggcactggccgcgttatcgcgaccgctatttcttgcctggcaatgaccattattacttacagttacgggttcgctaccggggtacgcatgagcgcaaagactctaatattatccctaggtgttttagtaatttccgcacttttcggagcggtatttggattattaacaggtctgctcatcccctcagatgcggcgcaaggaatagttggaggcggctcgtcactaatcgctattttttcgggaatgtttactcctttagaacagatgggcgcgtttgtccaaaaactgggtgagtttatgcctatgtggggatataatcagcttttacaagccacatttaataatcaaactattttggggtggaaaatctatttgaatatggcagtgtggactgtgctgctattgggaatagtgttagcgttactgcaacgaaaaaagtcgtagttaccgcctagaactttatcgccgataatgccagcaaaactgactagcgactggtggaaatgagggaatatgttaaaaaatagggactcttgggctttcgctttccctcccctactatttcttattctgcccctttactatatgtcggcaggatttccacaaatcagttaccttgtcgctttctttttgatggtgctgtttggcgccttctacgtggcggcttggctacaaatcccctatcgtccgcgccgtttatcctcgcttaatatcgctattctagccgggctaatcgccacctatttgggaggatggtggatagcgggaactaacgccccggtagcctttcaagcttcctatctttgctcggtagctatatttttactacctgcccgtcttgactattacgcattagggataatttatctgctgacaatgctgcaagtagctatctctccctctataaccaactggtcggcggtgctgataactatctttacttctttagcctgctttgctggtcgcagctccgttgaggctgaaaaacgccggacgctggcggcagctagtgaaacacaggcggctaaaatgcgcgagcgagccaggattaacgctgatttgcatgatgttttagggcagaccttaacggctatttccttaaatgctcagctcagttcccggcttttgcaacaaggcaggaatcaggacgcggcctcggctctccgcactgttcagctcctttcacgacaggctctcgcggatgtgcgacaggtggttagcgcttctcgcgagattgtaatcgctgaagaaatagaaaatgcacgggcactttgccaggcagcaaatatcactttttctgttagcgccctggatactatcaagcccgaaatcgagaatctggctgcttggatgattcgcgagggaatctctaatctggttcatcattccggctccgataaggcctggctgctctgcaccgctaaaagcgtttgtttaatcgataacggtaaaggttaccaggagctagtttcagatagtgataacgccgggtcaagtggtaacgatgctaccggtaatggtctttgcggtcttaaggacagagccaaaaatctagcagttatttcttacggtaacctgtttagctcggcttgggagcagctaatagctatagaccccgagatttctaccagggcagatgagctgattttaccccctaaatatcctcgtaaacaccctcatggattcttccttgcgctttatactcgctagcttgcggcgcagttcatttaaggcactcgccgaaaaccagtcatttgtcgctactgcgagtgttgtgcctgatacttgtggtacttactcaactagcgctatggaataattagaacatgatttcgctaatgctggtagatgaccaaaccctggtgcgacaagctttagccagtttgcttagtttagaggacgacctcaaagtttcagggcaggctgacaacaaccaggcagcgttacagcagctgcgcgccctacaaaatagtggacaggcagttgatgtggcgttggtagatattgagatggggtcagattccggactggatttaactcgcgaaatcaaacaggctttcccagacacaaaagtactgatagtaacgacttttggtcgtcccggatatttaagccgagcgcttgcggcaggagctagcggttttattgtcaaagacacccccgcggatcagctggtgagcattattcgcaatatctatgcgggagctaaacatattgaccctaaattggctgccgatgccctagctcaaggacctaatcctttaaccccgcgagaaatcgaaactctgaactgtgccttagctggggctagtatcgagcaaatagcggctacagttttcctagctcccggcacggtacgtaatatcatttccggtgcaatgaccaagctgggagctaaaagcagaatcgaagctgctcaaaccgctagcgccgccggttggctataatcctactgcaataagtccgagtgcgttcccgttcgtgttagcgaaagctcaatttggttagaactaattttatatatcagtagccaatcagggcggatatgacattcgcgatgccccaaccagtttcccgttagtgcgtgatcctttagtgcttttggaagtgcttctccagccgctaacagccggataacgtcatctagctcctctatgggaagcccacgccgaatagcctgcttgtagtctttcttaaaccggctagtccattgaatctggtagctcatgattttagttcttttaacgcctcttcgacatccgaatagcgttttgcatctgggtcagctagtaatctctctgcttctgttagagccatctgggtttgatagttgggcgatttttgacggatttcaaacggaaatcctcccgcttggatagcctgacgcaaaaaaatattaatcgcggtagtcatattaacccctagattgcgaaaaatatcttcgctttgctgcttaacatctttatccatgcgtacactgaaactggtagtaccggacatagcaaatcctctctcctgcaataaaatacatctataataagtctattatccaggtattagatatgcaatagctattagtttctactaactgaggggcagggtgagggtgaagatggctcctgaggtggcgcgattttcgcctgtgacgctgcctccgagggcttcggtcaaggtttttacgatcgccagccctagcccggaggattctccgggctgccgcgcactgtcggcacgcacgaagcgatcaaatagggtatcggtaatccgctcgtcaatacccggtccgttatcggccacctgcacctgtacttgccgatccgccgtaaagccggcgctaacctgtactttggttccggcaggcgtgtgctgtgccgcatttgaaagcaggttagaaaaaatctgggcgagagcggattcgctgcccgctaccctggctgcggccaattcttcccctatttccagttcccagaggtggtcgggataggcaatccggacagtcgtaaaagtatccaccaaggctcccgcaatcggcacttcctctacctgggcactttgtccggcatccatccgcgccaacaaaatcaaatcagaaactagatccgcgagccgcccactttccctttcgatccgctcgactgcgtctgcggcctcctctcccaggttttgccgcgccaatagctgggcgtatccactgatagcagcgacgggggtgcgtagttcatgagaggcgtcagctacaaattggcgcagctgcgcctcgctatcctcccgtagtttcagcgaggtttcgacatgttcgagggcgcggttcaaagagcgcccgagctgggcggcctccgagtcttcccgggtaactgcgtcttcaacccgcgcaggtagcttagcttcgttttggagatcgacggtttcaacttttcgcgctacccgttccacctgggctagatcccgcagttcccggcgcaccaggaatcgcgccaaaaagtaggcgcctagcagagccgcgagcgatcctaaagtgtaaaagagggtaaaggaacgcagagtttgatttacttcccgcagcgggattccgctggcgatctgggcagtgccaccggggctactcaccgagcgcagtaccactcgataatcgcctagcgaaatcaggtgaacattttggggatgagcaactgaatgtgccaacacctgctgcacctgggcgctgttcaactggcgcgagccttctttcgggctagctactaaagaggtcgcctgactgccttgatagatgaggctaaatgaaccggctgttattcccgggaaatcccgtcctgggtgcggtttctccggtttgtcgacatgctctccctcgccgtctttgccatgcggatcagggagtttattcgcgtgcggtgtatcttttgccagctgatccgccggttttcccttgggagattttccctgttgcgcgctttccttctccacgtttaaaggagttcctaaaacctcttttccctggccagcccgggcgatctgggcgagttgattcacagattggttaagtgaagtgtcgagttgagtatagagggcgcttcgcagcgtgagtcccgcgaaagttcctaccaccgcgagcaccagcaggcacacccctagcaccatcaccggtaggcggcgcgaaagacgacgtgagggggcgcgtaaaaaccggcccctattgcgtctgttattagccacgcgcctgctccgaacgcatcacgtaccctactgcccgcacggtttcaatcaatggttctgtctcctggtcgatcttttttcgcaggtatgagatataaagttccactacgctggctttgccgccgaaatcaaaatgccagacggcatccaggatctgttctttgctaaggacccgatcacaattttccatcaggtagcgacacagttcgaactcggtttttgttagctcgattggctttcctgcccggctaacctggcggctatctaccttcatttctagatcttttacccgcagcacctgctctttggggtcattttcatcagcgaaaccgctgcggcgcaatagtgcctctaggcgcaactctacttcggtcaaatcgaagggcttggttacataatcgtctgctcccgagcgtagacccgcgattttatcggcgatagcatccttagcggtaagcattagcaccggaatatcctcccgctcacgccggatccgctccatcgcttcaaaaccgtccattaccggcatcatcacgtccatcactaccgcgtccgggcgctgttttctggccagctgtaccgcctggaatccatcattagcggtgaaggtttcccaaccttggatgcttagagcctgcgccaataggtcggctaataatttttcatcatccacgatcaggattcggggcacctggcctgcccgcgccaaaccagaggcacgggcagactttgtttcagtttccatgtcttaattatgcctttaccttgagctgttcaggtggctttagctgttattggagggcgcgatgctatggttttgaaagtcgcctgtccccccaataccgttttcggaattgctttgtttctgctggttttgcggtttttggttctgattgtcctgcggcggttgtgactcttgcccattttggttttgcccgtcgggtgccatctggtcgtattgtcctcccggggcgttttgccccggcttcctaggaccgcaaggccccagatcgccacctcttcgcccgtcaggagccatctgtccgccgtgacccggaggcatatgtccgcgagggccttcatttgagattgccattcccgatcccatgcctcccataaacagaaggattgccgctcccaccagggtcactgctttaacccaggtttttttgaaaaaagtggcaatttttccggtctcagcgccggtttccttcgcgaaggcttccggctggaaactctcttgggtgaggggcactgccgacgctccggactgcgcgcccgcagggggcactggttgcctggattcagtttttggttcagtttcctgctcggtttccatcgactgggttccgtgagctgccaaagcaggctcgggggcatcctgatcattttcctgctcgggcaaccgctcagtaactttaccgtcttgctctagattttcttcctttgcttcattttcgggattcatttttcctcctaagttgtttctttaactaacatctttaagttaagaaactgatttatgaggctaggaagaaaaacctatgaatttgctatggatatttttcgctgcgcgaatagcctttcgttagcacccggaattacctatctgaacagccgttttacctttactgaggatgcttgaaagtaatactcagaacccggaacccgggacattattttgtgggccggttcgcacagttggcacagaggccgaaaatatctgccatatgttcgatatcgctgaactggtagcgctgagaaatttcggaaatccactgttctaactggtcatcttggatatcgacggtgtatccacagctgcgacacaccaggtggtgatggtgtcggcgcgccgcacaccgccgataaagggtttcgcccccttccgaacgcaagctatccagctctcctacctcggttagggtctgcaggttccgatacaccgtagctagtcccacggtttgcccggcacccattagggcagcatgcacttgctgggcggagcgaaaatcggtttcatcagccataatcgccatgatcgcgtctcgctgccgggttttacgctgcattgccattgcttcttttccctactttcccgccctttaacgctgccgcagctggcaaattttcctgactgctgcctcgagggcatattgcggatcccggctagcgcctttagcgtcctcgtctgcttgcgcaataattttaatcgctgccgctaattgtgaatctttccatccgcgcacttcccgccgagctttttccacctgccaaggtgccattcccagctgggcagggtttattccccgcacgctcacttttgccaggttgcgaaacttgagtgcgagcgcacccccgatcgcgaccggctccaccccggaagaaaacgcttgtcgtagcagcactagggcgcgcgaaagattccccaccgctgctgcatcggccacgttaaagccagtagctcctacccgcgaaccatagaactgctgcactgcctgcaaagttaccgcctgcggatagtcagaaactaactggcgagcagcgccgattagttccgccaaatccccacctagcgcatctactagcagctgtgccccagctggctctatgcgtccgccgaccgtgcgcacttcttcaactactaaggcaagtttgtcgcgggcattctttactttcgcaactttaacttccctagctcctgccttctttatcttgtctacctggcgttttcctttattagtgccatcgtggagcgctaccacccagcaatcaggttgcggggtcaccagataggcggccaagtcctcacccaaagcttcatcagcggattcaaaatcaggaatcaccaacaggcgggcttccccaaacaaagagggcgaagtcaaagaatccagggatcctacttgatacccggcagcggtcacctcagtcactgctagagccggatcctggtttcgtcccagttgtttcaagcgggtcagcgcccgatctgccagcagtttttctggtccgcgaatcaatactgcggattccagggtgcaatcgcgccaactcatctgctttgagaccatgcttcaacattgccaccgatcctggtttttggaaagtagcaacgaaaaataaaggtcaccccgcaggcaactgcgactaaagctaaaatcccggggattccttgcggccagggcaggatcgcaaaggggttactggcaaccccgcgagctaccatcatcacccaggtgcacccgactcctaaggttttagctagtaaagtacctggtagcggcaagaacgtcaggcaggcacctccccaaatcaacagggttaccaccggagctatcgccacattggccgctacggttagggtgttgattccgggacggattagcagttctcccggcaagcaagctagctgtgccaccaggctaactgcgctaaccgccagaaaagccgctaaaaactttcccaaaagcgcgcgatatttttcaggtattacccgagctatccgaccgcttccctttctttccagcgatttcagtttttcttgtaacgtttcctctaccggtttagcgaccagcacaatcgcggcagtggcactaactgagagtaaaaatccggcatcctgaccgaaggcgggttcaaaaattaggagcccgattacggccgtttctagggcgctaaaagaacggggttccctacccctagctaaagccagcacactcaccatacccattaccgctgcgcgcagcagtgacggcgccggccccaacagtaggcagtagcccactaaaaggctcccacacgccaccagacgccagcgccgtccaagaccagcagtaagcagtgccactagggacagcaacacagaaatatgcatccccgatacacaggtaatatgcacaattcccgcagttttcagcgcttcggtatccgcggaggcatcggcgcggatacccaggatcatggccggcagcagcatagctgctgccggggattttgcggctatcagtttctctttcagcctggccgcgaacttttgtttgagggccgccgcaccgcgcggctcggctcgaatttttggggtagccatgatttgggcgggaatctcaaacagagtatttgcgctggtaaaatcgcttatttctaggttgctcttcccggtgcgatgcggtctttccagtttcaggctggtttctaggacggttccgcgcggataagccgttagatgctggccgaaggccaccactttcaggcgggttttaaccgccggggcaggcggcaatctagcttctaatagctgtaactgggttatttgttggtcactgccgggcgcatattttcgcggcggcccttctaccattgctaacactcgaactttggagatctccccctgccaagcgcgcgctaaaggatccgctgcaatctgcctagcggcctgcgaaaccgataaaccgaccgcaccaaatgcggctaccgccagggctaaggttaaccctaccggtgctaaacgctggaaataaacggcgatcagcagcgctgccgctaccaccagggctaaggcactgataatcggttctaggtccaggggtaaggccggtaggatcagcgtccctaaccaggcagataccgctgctggcaataaccgtaaatccaggactcgagagttcacatttacgcctagactttgattaactccgccaaggcagcatatttcttttctccgattcccgaaacattctttaagtcctcaatgttttggaatcgcccctgctccttgcgataagccactatccgttgcgccaaggcctcccccactccggggagctgttctaactgttctttggaggcatcattgatagaaattttgcccccagaccccgcagctgccccttcgccctcactgttttcccctgcgctagctccgccactatcgctgcctgcactttcatcaatccccactcgaatctgctccccatcactgactttgcgcgccaggttcagctccgataaatccgtccccgcaagcgcacccccggcggctttaatcgcgtcttgtacccgggcagaagcgtccaggcgcaccacgcccggtttattcacttttcccactacatccaccagcaccgccccactcgttgccggggcagacgccgatgaggaactgaaactactagccggtaaagaagcactgcttttaggggttttactttgtgaccagcccgccagcaccgccacgatgaccatgacaaccagcgctaccgccactatttgtggagagggtaccaggcgcgcccgcaaaccccctgcaggagagcgtaaccgcccctcagcctgggctaaaagtttttccccctgtgcgacgctgcgagtggcctggcgaaactgcgcgcgggtatagctggatttttcctgatccatagggcgaaactattgcctgccaccttaggccgcaatctcaaatctgcggttaacaggacaaagcggcgttatctacccttggggacagaccctcaagtagccgtccccgccataaacccccaaaataaaagagggttaaaagcctagtttactcgcatcccaagagcgtaacttttccaaagccgccactaaatccgggcttaagggtgcttcgaaagtcattttttcgccagtgaccggatgagtaaaacctagggataccgcatgtaaccactgtcgctccagccccagtttcttggccagcagcggatttcccccatagatagggtcacccaccaggcaatgacccatcgcctgcatatgcacccgaatctggtgtgtcctgcccgtttctaactgcacctcgagcagcgaagcgccgggcaaaagctctaaagtgcggtaatgggtaatcgccggccttcccccctcgactaccgccattttgaaatctcgggagggatgccgcccaaccggggctgaaatcgttccctgcgctggttctaggtagccttgcaccagggcgtgataaatcttttccacccggcgggcgcgaaaatcctcctggagctgtcggtatgctcgctctgatttcgccaccaccagggcgccggaagtccctacatcgaggcggtgcacgatcccgatacgctcgcttggccccgaggtggcgacctggtgccccgccgccagcagggcgccaataaccgtaggtcccttccatccgggagcggcatgcgcggctactcccaccggtttattcaccaccacaatatcggcatcttcaaaaagaatcggcagttcaaagggggtttctaaactttttggggaggtatcgggcagcagcacttccacctggtcttcgggaaagacctcggcagatttccggggaattttcccgtttacctgcacatctttttgtttaatcagtttggcaactagtgaacgcgaaagttccagttcactggctaatacctggtcaagacgcatcccccgcactgaatcgggcagctgcatcgtaacccgttcacgcatctttgcctcgcactcgctccggcttataggcgtgttttccgctggtagagggtactcccagtaccaccagcaccaccacggtaataacccccaccacaatcgcgatatcggcgatatttccgacaaacatagagcgatagtttaagaaatcaatcacgtgtccgcgaaaaactcctggaggacgcgtaagccggtcaaccaggtttcctagcgctccacctgccagtagccctaaggatagttgccacgccagattggtcatagcgcgcccactccaaataatgattactagcactgccgccgcgatcaccgaaaatacccaggtgaagctttcagctagggaaaaagcagcgccagggttgcgcaccagttgcagaccaatgaaggtaccgattagtggcttgggagcggctcccacttctagggtgctgagcgcccaggccttggtggcttggtcaatgatcagcaccggtagggcaataaatgcaaatatcaccaagagcggggcggcttgcttcttttctcgcttgttcatcttcttcccagatcggttgagtctacgactcaatttaataaaaaagcagcgatgccaccacttgcgtggtggcatcgcttcatcctccctggctctcgggaggaactaggcttttttatgctatttaggcctcttgggcgtcgagttgcccgattagcgcctgcaggtgctcgcgcaccttgtggcggtagtcattctcgaaggccttgaggtcatcaacccgggtttctagatctgcccgctcggattctagctgctctagcacgcggcgacgctcatcattggcttcgcgtacgatctggtcacccttgagtcgggaatcttccagaatctggtcggcttcttgctgaccgttgcgcacgtattcatcgtgtacccgctgtgccagcgccagcatcgaggttgcgtcctcaggatggtcgccggcgctttgtggagcggcagcactctgctgtgcctgcgacagctgttcacgcagctgttcgatttccgcaatcgcttgctgggtttcggcctgcgcttgctgggtctcggcctgtgcctgtgccaaagccgcctgggcttcttgctgggtctgcgccaagtgcgcctgcagcgcctggatttgctccccggcctgcgggtcaccttcggcagctgccgcctggaactgctgtacctgcccctgcatctcggcaatctgtccattagcggtttctagctgcgccttgagggcagctacttcttcgctattgtcgctgggggctactgccccaccagcagcagcctgctgacgtgcctcatccagttcggattttaaggacgcattttgatcttgcagggtcgcgatagtttccacgacctcatctaggaattcgtcgacctcttcttggtcgtagccttcacggaacttggttgcctggaattgcttccagtgcacatcttcagcagtcagcagagccatacctgtcacctcagtttgttatcgtcttcttccccgggaaagctgttaacttcctcgaggaacttctgcgctataggttgcagttggaaacaagcataccgaagttttgctcaacttccacatcttcaacaatagtaacatctatgattttcggcaacactttagacatttttctgcggttttaggaactaaaaagcaccaaaagcgcatttactaagtgggtccaaatgttaattaagattgtgaccagcaaaaacagtactataaaactaagatctagggcgaaagtcccaagacgcagtggtttaatgaatctccctaagaaacgtaaaggcggatcggttaaaccaaaaaccagattacaaagaaacagggtcagggaattatttggtcgccaactggggtttagcgccatcacccaggacaagacagcccggactatcagcgccagaatgtacagttgcagcagccatctgccaaccagaccgacccaatagattagggaaagcatctagttagctttggttgaagaaatctcttttagaccccagggaggacgcgccctcgtctacctgtacagacttgggggaaagtaggaacacccggttcgtcaccttttcgatgcccccatcgagggcgaagctaagaccggcagcgaagtcaatcatccgccgtgcctccaagtcgttcattgcccccaggttcataatcaccggggtgccgtccttgaaggcctccccaatattttgcgcctcgttataggtggtggggcgaatggttacaatccgttttagatccgaagccgattcgggctgggagctgaccgcatgcgggaaacgcagcgccggctctacaatccgaggacgaggagccggaacttccgcatccggaacttcgctttgcagctcatcgctatattcctcgttctcttgcggttcggacaggcctaaatagtccatcgtcttcctcaaagcgcccatcaggttctccttcgttaaatacgggtctatgaaaacgttaatcgtgaccgggttttttaggaagcatcccctcggcgtgttcccaaaactaccgacctaaaattgcagttcagccggctggcacctcacctttaccaactacaatccccgcgaagcgtccggtgacggaatcgcggcgatatgaataaagatttcgatcttcgaaagtgcagcgtttagaggcgaaagtaatccgcactcccgctgtgcgcagctgggagattactcctgcctgcagatccaaaccgggggtacctgagcgagtccgcgaccaggcggccggcacatgtccggttacatgggtgcgcatcgcctcgggaacttcatagcaagccccacaaattgccggtccgattgcggcgtgaatcttcccgttctgtgcgcctagttttcgcatcgcgattaccgcttcccgcgcaatcccggtcaccattcccgctctaccggcgtgtacagcggctaccagcaggccatcatcagatgccagcaacaggggtacacaatcggccaccattactccggcagcaggggttgccaaccccagctccgcaaattcgcgggtatcaataatgattccatcggcatcggcagggctgtcagtgtaaccaggatggacttgtgccacccggttggagtgggtttggtgcatccataccactttccgcccgatcgcctcatcaacgattttgcgattttgcgctaccaccgccgggtcatcaccaacgtgatctcccaagttgagagtggcatacgcgccggtggatccccctccaattcggttggtgaaaaccgcctgcgctcccccgaggtcaaacatggcggcctaccgcatgaagtcgggtacgtctagccccgattcttggtcatcgtcctcgaatactcgcggtaccgtcaaagtagcgtcatcctcacgccccgtatctaccccaaagttatcgcggtagctgtgggagctctcattttcccggcggctaaaggcatcgcgggagggcggagttaccggcaggcggtgcgctcccggcgcgctagcgcgcggcaaatcccccacgctgcgatcttcatcgttcaaggccgcccggcgcgggaaagctgggatcgcagaggtagcagtggagtcctctttttgctctttctttacaggggcggaggccggttctgccgctggttgcggcgctttctgctctaccttagcgctcttggctttgcctttagcttttttagggtcatcgaatccggcagcaataatggtcactcgaatttggtcgcccaaggcctcatccacattggcaccaaaaataatattggcttcggggtgtaccatctcgcgcaccatatccgcggcgcgatgtacctcgattaagcccatatccgagcctccctggaagaacatcaacaccccgagcgccccatcgatattggcttctagcagcggggacataaatgcggcttcggcagcgcgaatcgcgcgatcttcgccggtggcagaaccaatccccatgagggcggttcctgcccccttcatcacgcttttcacgtccgcgaagtccacgttaatgagggcggaagtggtgatcagatcggtgatgccctggacaccggaatgtagcacttcgtctgctgcggaaaaagcatcgaccatggtgatgttttgatccgagatttccaggaggcgatcgttaggaatcacgataatggtgtcgacctctttgcgcagcgcctctaccccggcatctgcttgggtctgacgacggttaccttcaaaggagaagggtcgggtaactaccccaatggtcagggcgcccatttctcgcgccacccgcgccacgataggagcaccacccgtaccggtaccgccgccctcgcctgcggtaacgaagaccatatcggcaccttctagggtgtctttgatttcttcttcgttatcagcggcggcgcgctcgcctaccttgggatcggctccggctcccagaccgcgggtttcttcccgtccgatatccagtttcacgtctgcatctgacatcatcagtgcctgcgcatcggtgttaatcgcgatgaactcgacgccttttagcccgaactcgatcatgcggttaacggcgtttgctccgccgccgccgatgcctacgactttaatatctgccaggttcgtatctggtactgtcacggtcgccctccgatctaaccctcaacctttagtttagggttagtttttcttgccctcttggtcaaacgaaaatcctatgtaaagtggcgttttcagcaagcactcggcgcgcgtgttgccaaatttgcgctaaatgcgcccccgaatcctcgccgtcctatcattgaagacgaggactgcaatcccaggaggaaatatgcccactatttttactcgtatcatcgctggcgaaatccccggcgagttctgctggaaagatgacatctgcgtcgccttcgccgacatcaaccccataacccccggacacgtacttttagttccccgccgggaagtcgaaaactactgggacgctcccaccgaggagctgcagcacctgatgaaagtggcgcagattatcggtcgcgcccaacgccaggctttcggctcccagcgatcctgcctgagtattgccgggttcgacgtgccgcacctgcacctgcacttaatcccgtcgaactccatggaggatatcaagttcgcgcacgcccagccggcaaccccggaggacattgccacctctatgcaggcactacgccaggcgattgccgaccaggggtatgcccacgaagcaggagttaacgcctaaaactaaggttttaggggtgaggcgcaggtgacgtgctagttgactgacctaaccgtaggcgcgtgctcggggtgaggcgcgggcgcggggaacgcgcactcaccttgaggagcaaactagtgcccccctactttttcccgagggcgcgttacagcagaaggcgcgacgctaagttgggtgcgccaaaagggtgcgttaacagcgtaaaggccatgactaccccgcgggcaggtggcggcggagataatcaagttcgctttggtcgtaccaggacagcggctgcgccgccagttcttcccaaagctcccatccggaagtttcctgcgcgtcctcaccgctaaagtttccccgacaccaagccgcggctgattccaaagagaccgcctctctgacctgctgacataactctagttcttcggggctatcgagatgtaggctgaccaggcgctgccagtcgaagccggttttcacttcaaaaacaccgagatcgctgctggcgctgatttcactggcttccacgtccagcgccgctacgatgcgcccttgatagccactggcgggaacctctaggcaggacatcgcagccatagtcatggccatatcttctgcctgttcttcatctagggggtcaattccccaaagctgacaaaaatcatggttgcctgtccaggcgaactgagaataaagctgctggttagaaagctcattgaccgctacgggaagataaatacgcacctaactatgctaacgcccgcgcgccctcttgagccttagcccaccccgaagcatgcttaaagggaggttgccaggatttttcttacctcagcaaccaccccagtaactcatctatctttaattttttcttaatttaaaattgctaacagcctctttacagcaattttgattattaaaacgtcttttggtttcctctttaaacagcgcaaaacgcgacttggcaatgatgcctgtttccccgatgcccttaatggattagcggcacaattctcatattctaaggatccgaaccgatgagtttagcagcaaggcaacccctcttacgagagctggaaaatgccgataacgaagtagaaaatagtaaaaaccgtttccaggaactgtttccgccgggaaaacctttagtaactatctgtcctcaagatgggaaatattccgggccactagcaatcatttgccccgagctccccgaaattcccctcagccccaagtatggcccgttagtagtgcggacgttacgccctaaagaacaagaaaagccaggggtgttgcctggcgcgaaccaaggggaatcgctaactaagctaccccagataaaaccctgggtagcggccgcggtgaaaatgatttttgaagtgttttccgggcgacgctccgaacaagccgtcactaactggttcaccgcggagctgcgcaaaccctttttggctttggtacgcgccgaaaggcaccgtcccctgccggcaccgattcaagtgcggcgtatttgttaccgcaaagccggggagggcgaacgtggcttcaaagggatcgaggtcgcggttagtatcaatgacggctcccgggtgcgggcaatcgccatgcgcatcaaaccctggggaaagagctggcgaatcaccgccctggaaatcgggtaaacaacacgcaaaactagggtaagcgcgcaaacccgcgacagatatacgtggcagataccgcgaatacctgaaaggctgatctagccgctctctacccacgaaaccgcaggtaaaggtattttaccggtttactaacggcgcttcttgcgcttcttttgagcgcggcgctgagcccggttaccgccttgcgcggcggtttgccgggcggcctcggcaccaaatgccgatccttgtccggaggcaccggccatggccggcacagtttgcgaggattccttatgcccggtatcccccatcactgagccttccgccagcgccttcttcttggcttgttcagcttgctgcttttctgcctccagctgttgctcgtagacctgctggaactggtgggagaaactgaaaataccggtaatagtatcttcgcgcacctgccccatcatgttttcgaacatcagcgcaccctcggatttgtattccaccaaggggtcgcgctgccccatcgcccgcaggccgatgccttctttgaggtaatccatttcgtagaggtgctgttgccaaagacggtcaaccgtggccagtagcacccggcgttctagttccgccatcggctggtcgcccaactgatcaatcgcgattgggttctcatttacctgatccagaatctcttcataggcatcagcaatgtcatcctgcagcttatgttccagttcggtagccgaaatatgcaggaaggcgccatcctcgtctttgagatcagatagcggggtgcgcaccggataaaccgcacgcagattgctccacagtttttccaaatcccattcgttggaatcggcgccttcgctggtggcatgggtgactgcctcggtaatcaaagtgcgcaggtaggaaggaatcagctcatcgagatcgattttcttgtgtagcacttcttgacgttcggtgtaaatcagatcgcgctgatcggtcatcacatcgtcatatttcagcacgttcttacgaatctcgaagttctgcgcctccgtctggtgctgcgcggactgaatccgccccgacaccatcttggattcgagcggcagatcctcggggtagagcgaagaattcatgaaccgggttacgaacgccgccatgttcttcatcattagcgggtcgtccatcgccaggtagaaacgggattccccggggtcaccttgccgtccagaacgcccgcgcagctggttatcgatccggcgagcatcgtgacgttcggtacctaggacgtagagtccgcccaggtcaacgacctcttcgtgttcatcggctacctcggcctccgcctcggtaagggcatcctcccaggcttcttgccattcggagagattttcttccggatccaggccacgcgcacgtagtttctggtcagcaatatgttccgggttgccgccgagcataatgtcggtaccacgcccagccatgttagtggccacggtaaccatgcctttacgcccggcatcgaaaaccacctgggcttcatgagcgtgctgtttagcgttcaacacgttgtgcggcactccggcctcatccagcatgatagaaagttcttccgacttggcaacatccgtggtacccaccagaatcggctggcctttttcgtgacgttctttaatgtcattgacaatcgccttgagcttgccgcgccgggaaggataaaccaaatccggctggtcaatgcgaatcatgggtttattaggcggaatcgggattaccccgatcttataggtgttcatgaactcggctgcctcggtttcggcggtaccggtcatgcccgcgagtttttcgtaaagacggaaatagttctgcaaagtgatggtggccagggtctggttctcggccttgaccggaacatgctctttggcttcaatcgcctggtgcatcccttcgttgtagcgccgtccctccatcacgcgcccggtgtgttcgtcaacgattagcacttcccggttgcggacaatatagtcacgatcccgtttgaacagctcttttgctttgatcgcgttattgaggaacccgattaggggggtgtgggaggcttcgtagaggttgtctatccctaagaagtcttcgaccgcggcgatccccacatcggttacccccacggtgcgtttcttttcgtcgacctcgtaatccatatccttttccaggcgggtcaccagggaggcgaacttgttgtaccactggtcggcctcgccttgggcgggaccggaaataatcaggggggtacgggcttcgtcaatcagaatcgagtccacctcgtcgacgatggcgtagtggtgtttgcgctgaacaatgtcttctactcgctgcaccatattgtcgcgcaggtagtcgaatccaaactcgttattggtgccgtaagtaatatctgcctggtattgttttacccgctccgttggggtttggccgttgacgatacagcccacggttagccccaggaaacgatagacacgtcccataagttcactttggtaactggcgaggtagtcgttgaccgtgactacgtgcacgcccttgccgctaagtgcattcaggtaactgggcatagtggcgaccagggtcttaccttcaccggttttcatctcggcaatattgccgttatgtagggcgattcctcccataacctgcacgtggtagggcttttgcttgaggacgcgccaggcggcttcccgcacagtagcgaaggcatcgaccagaatttcgtcctcggttgcccctttttccagcgcctctttgaattcggcggtcttggcttttagttcttcgtcgctgagggcggcgtattcttcttctttcgccacaacttcgcgagctgtccggtctaggcgtttgaggattcgcccctcgcccatccgcaggattctttcaaaaaacgacatttgttctcccgtgtgttcgctccgtttaccgattctatatggctgcggcaaaaagcacgattagttattttagtttttcctctaggcgtagcacctggcggtactggtttttcggctcctgtgcctagctcgcgggtttttacggttcgtacgccccagctttgtgcgctggttgctacgccccgagctttgctcgcagctcccgcgccttaccggtatcctcccaggtaaacccggaacgtccgaagtgtccgtaggcggcggtgcgcgaataaataggtcggcgcagcgaaagccgatcgataatagctgccggtcgcaggtcgaaggtttcccgcacggcctgcagaatcttctctttatcggccttttcggtaccgaaagtttccagttctaccgacaccgggtgcgccgagccgatagcgtaggccacttgcagttctgctcgatcagctagtccggccgcgaccacattcttggctacccatcgcgccgcataggccgcggagcgatccactttggtggcgtccttacccgagaaggcgcccccgccgtgacgcgccatccctccgtaggtatctacgatgagtttccggccggtcagaccggtatcggcggccgggcctcccaggatgaaccgacccgccgggttcaccaaggtgcggaagtctaggttttcaacccatggcacctgggcgattaccggatcgattacggcggcttttacttcttcgcgcaggtctttgaggtttgcggaggcgcgatgctgggtagagagtacgatcgtgtccaaccccaccgggtgcccgtcctcataacgtacagttacctgggttttcccatcgggacagagatagtcgaggattttttcccgccgcactttttcgagtcgcttggcgatgcgatgtgccagccaaatcggggcaggcattaaatcgggcgtttcgttgcaggcatagccgaacatcatcccctggtcaccagctccctgctggtcaaaagcgtctaccgcttcgccttggcgagtttcccacgaatcttgcaccccttgggcaatatcggggctctggcggtcgatagaaactagtactccgcaggaatctccgtcaaagccaatatcggaggaggtgtagccgatttcgttaatggtgttgcgcaccaaagtgggcaggtcaacatatccggaagtggtgatttcgccggccaaatgcacttgcccggtggtggccatgacttctacggcagaccgagcctccgggtcttgctctaggagggcgtccacgacggtgtcggcgatccggtcacagactttatcggggtgaccgctggtgacggattcagatgtaaaaatcgactgctttgagctcataacctccagtttagggcagcccttgcctcggagggaattaagcgaagttaagcgtcaaaagtcaccataatgcgttccacactggactattcgcaacacatcgccatcgatcttgaaaaccagacgatttttttcatcgatgcgagcgctccagtatccagaaagatctccccgcaaaggttcaggtttgcctatgcatttgtacccattacggtcaattgactgtattaacttcaatattcgtctcacagttttcttgtcttgtttcaaccaatactgaaattcttcccaagaataatctgtccaagccttaatcaccgggcagaacctcgtgaatagtaccgccagtttgttccatttgggctattgaactgcgcaaacgcttcatatttgattctgagtagaacggatcaatagacacctcgaacgggattcgcttctcccgcacgacctttgctgcaaacatagtgtaggcgctggtagccgtaagccccagttctttacacgtggcttcaagagattttttcaaactagcatccatccgaaaattgacagttgcttgtgccacttcaaccactccttaaatacaaatctcaacttctgaagtacatattagaggttttgcaacacaaatggaatacttttttacattttgcgctcaactgccgtcactttcaccagtctgatacacccccgcttgcacaggctcccacccccccctagtcggcgccggagggtgttctggtaccgggagggcggttttgtccatggagggcgattctgcacgcccccacacgcgccttcaggcacaacgcgaacatttccaccctcccgcgacatttccgccctccagaggcacaaaaacgagcgctttagaggcttctacaagcgcggcggagggtgatcttgaaccgggagggcgattttgtccctctccttccttccaggcgcgccggaggatgatccggtactgggagggtggttttgtccgtggagggcgattctgcacgcccccacacgcgccttcaggcacaacgcgaacatttccaccctcccgcgacatttccgccctccagagcgggtgtgaggcggacgcggtgagaagtgaggggtgaggggacgggatgagtagaactcagccgcatgggggtgagggcgcgaggcggcgataaagcgatcagacggcgggacggcagcgaagtgaccgggcggtccaagacagcaggacgagagtgcggagccggggcggcgaagaagctatcgggcggaggaggagcggcgggcgtcggatgtgcgcgcggggatcgggttaggagaccaaaattttccgaacttcacccagtttttatggacttccgcggggttgaagatacaaacacatctgacggtagcctgtggataacttgttgcgtaattcatcgaaattgaaattaagaatgcgacatgaaatttgattaaattaaatgcataagttcttttatttttatattttattcactattcttttgtcacatttatctattaattgccaaaataaaacgattttccacaaaaaagaccctattttgggcttcgccagggctctcacgggcaacaaactcgcgcacgaaatacttcaccacatgcgatcaaattgtgtcgagtttcatataaattatttagctgaacatctactcgctagaaggtaacgacgcacgaagacgagaggaaataagaatatatgcaggtagagggcatgaaagatacaatcgtaaagccgagggtagcgagcgcaaagcgccggaaatcaacagcgtcgcaaacaaaaagtgcgggcgctaggtagatagctgctaagtgttggaacgcaagcgcagcacttcaggcgcaagcgccagcattcggcatcggcttccctatcgccggtagcgcgcactaataacgtcagcagcaggctggcgctaccgcgcgaaatagaccgctagtaccctgccctattcttcggcgcctaattcgctgtcgccggtaggcactaccagcaccgggcaagccgaatgcgccagcactgattgcgaggtggagcccattagcgctcctgcgaatcctccgcgccctcgagttccgactaccaccagatcgacagcggttgaaaactcgttgagcagcgccgccgcgtttccatccagggcgtgagaatgtactttcactccactatcagcgatttcttcctggcaaatttccttgagttcgctgcgcacatcccgcaaaatactttcgcgatccaccgatgctggcaaccacgccagtacccccgccgaggacgccattggtactgcctcgaccgcggtcagttccgcgccccatacttgggtttcgctgatggcgcggcgcaaagacttgcgggaacgctgcgaaccatcaaccccgataactattttctttaccggaacgaactggtcgtcagcgccacgcctcggcaccaccactaccggacaacgggaataggcaggtagcgccgaggaagtcgcccccagcaggcggtcagtaaaccctccgccgcctcgggtaccaaccactatcaaatcgacttgctgcgacagctgcaccaaaatcgcggtaggatcgccagcatcaactcgccccttagcctggtaacccaacttttctaggtgggcgatagcctcgtcaactacggtttgggcactgtcacgaatcgcatcattgtccaccaccgcgaatccggaatccattgacgcggccgtataggaaggtagcgcgtaggcacataatacttgcagctgggcgccgctttgcttggcgcgtgcgcccgcccattctgcggcctccagggattcgggggagccgtccactcccactaagatcttttctttttccgccatgatgatgccaccctcctgctgcaccgatgcctgcttgcttccattttataggccgaaggacgcatttgcgctgaaatgagcggtgcgcgcggaagcgggcgcggaaacctacgggggaaacgagccttgcgctcagctgaagactttatctttatcctgaggagccgcctggtcgctttttgcgctggttttgtcagcctggggcgcgggtgaggacttgtgtgattgcccggaatgacgagatcctctacgcttacgcgattcccggaacttctttgctctttccgtgcgggttagtctgcctatttgcgcgaagttttcttcttcattcccgctattttctgcttcatcgtcttttttacggtcttttcgcaggtaccgtgccacgatggttcctcctactgcggaaataattatcgggaggatcatccaccagcgcagcgcatcccaccaggtggggccttcttcgttcatagggggcgctgccttgagggcgatgcgttcagcggtaaccaccaggcggtgagtgttggtgccgtagggggtgcaggtaaatagggtcaaaatgtctttacctggtttcggctcaaataagtccaactgggtaggtttaatcacgtggatagcgcgtactttataagcaagcttttgccccgccacctgcacataggcaatatcgccgactttgacatcccgcaagccgtcaaacaaactggcggtcctcatcccggaatgggcggttagcaccgcgtttactcctttaccaccgactggcaacccggtgccaaaaaggtgtccggctccccgcgcaatcgcgtcatcttcggtgccatgccgcaccggcaagtctatttgcccagatggcaccactagacgcgccattacgtctccacttaaagtggccaggtactgtttatattctgccgacccggttttggtcatctggtagaggtaggggtcaagaatggggattccgcggatgttgcggttatattcatgcgcctgtttcagtagcgcctgtgactgatcgggatgattagccatccgcttcatttcttgtgcctctaggcgcgagatttcaccgatacgcacattaccagcgaaaatagcgactaccggataaagtaggagcaacgctcccactactgttaagacaatgattaagactcttcgcaacgcggtccccccttcaaaattcttagcagttttcgcctagctattcttttagctggctcggtattttcttaacccaactcgggtacttagcttcccgcagtctacaacgggctttttacttgtttagttagctgcttctcccctggccggccgacctgctttctgcggctttttccggcaagcatttccagcttaagggcgcaaagagggggcgatgcagcaagctgcaccgccccctctttggcattaggggctattgttcactctattattagttttcctagacctgcgcttagtccttgcggcgtttaaccgctagggtcacgccgatggaaactaggatcaagcccagagccgaaacgagtagaatcccctgcgcaccagtcagcggcagccccaggttcttgtggttggtaatatcaagcgcgttaccagccttagctttagctgcagccgccaaatcagtaaccgttcccggcttggtcaacttgaaagaaatcgcctgtggcagaatctggtaaccagccggagcttgttcctcaactaggcagtagggtacctggtccgctttcgctactgctaccccatcaatccagtcagtcatctgcaaatcagagatttttgctagaccatctgccccagtctcatttgaggtcttgatagtgccgccatagctggagcaatctttattgtccgaggtatccaggtgaacactgaaaatagcgccagccagagtctcgcccgcgctgttaaccttcttgattacgatatcgccgtgccgggtctcaacctccggggagttaatcggcttatcgttcttcttagaccattcgttcgggtacaacttaccggtgttcttggtcaagccatcagccggaacgctctttagcttgacgtgcaaagtaacctcgatcttggcgccaccagcgatagtattcagcccggcacccttgaaggctacggtgatcttgttgccttcggcagtggcatcaaaatcgggtgtagtctggtcgttaatcttggcggtagtctttacatactccacattggcgggcaactggtcgacaatctggtatagattacccaggtcagcaccatccatctttccatcgccattgacgtcagcaccagtggaagtggtggtcaagacgtacttaaactcatccataccgtttgcagcgccctgattcaaagtagtaacgcccttgtctacgaccttcttatccagttcgttttcctggttcttggggtagacatgtacgtcgctattccaggccttaccatcgggattggtcatcggcaaagtaactgcgaagggcgcaatcggagtgattttttccttcttaacctctttacctgcagccttaatcgtgcccgatccggctagatcttcaaccacgacgtagagacccctaggtacagaagaaaacgcagcttccccattagtgccagttgtcatagtcgtcgggttagcggccagagtgtaggtcttacccccagatacaatcccggtagtggcgacattatccttcaaagcaactgccccaatttcttgagccagtttcagaccatcattggtagaaacatcaacgccctcaaccttatagagcttaaaattaaccccctccaaaggtgttttaccattaagctcggcagcatcaatcgcagtaccatcgtgtttcaaacccgtggtggcgcccaaatacttatgtatcgtcaaatttgcggtagtgggctgaggtgcacccggggtcaactcagtattggcactggcggcgcctactcctgccaggcccatgaaggccatcaccatgccggttagcatggccaataactttttcttactcactttcttttcctttcaaatagagtgaatacaatagcaatccctaataccaggcaccctagaagcaacacttctaaagaaccggcgtatcccgataagggaagtttcccttccgggtagttagtgacggtcagggatccattcccgccactaaccgtgtttacatttccttttccactgataatggtgactttcccgttaccgtctaccgtgaagttcaccggctgcggcaggagggcgtaacccctgctggtctgggtttccttcacaacgtacttttggccgggtaacacctggaacttcacagttccatccgcaccggttttcaaagtcttttcggcaacatcggaaccctctttaaagagctcaaacaccacgcccgccatcgcggagccggtatcggatttcttattcaaagagatttcaatatccgatttctggttatagcgcttgaaagttatcaccgggttatccgcgctcggggaaaccgtttcaacctcgttggaaattagataccccttcggagccttagtttcctgaatcttatacttcacgccgaaagtaaggccggtaaaggtggcgaggccgacctcgttagtaaccagcgtcttcttggttccatcaggcgccgttagggtgaattccgcacccgccagcggcttaccggtttctttcgatagtttcgaaaccgtgatcctgccggtgtccttagtgttaggcacctccatagtgatcagtccggtaaacccttctagcagggcatagtcggatactttcaccgaaattgggttagatttcaggatataaccgctgggagcttgaatttccttcagcttatagatcttgttcggatccagcttcacggttgccggcaggttaaccaaaccgtcactaccagtaaccaggttggtagccacttccgtcgactcgtcctcttcatacaaggtgaacttggcaccggaaagcggaatcaccacatcaaaaacacctgccacctggcctggcactttaaccgagccgggagtgcccgacaccaccttgtccgctgccgcttcatcaatcgacttcaccaggggttcgaacttgaaaacccgcaggcgagaaggattattattggccgtccaagtaaactgctgcgccttataatcatcaactatgaaatcgtattgcgcctgggggtcaacatagtacccgatgggagctttcagctctttcacccggtaaataccgccatccagttcggtgaactctgcttgcccggtatcgactgtagttgccttcttaatcggctcggcgggccaagaaccatcgtcggcctgcttgaataggccgaactcggcgccagcaaggttgcgggcatcgccggtaacattggggtcaaccttggtgactaccagcgaagactgttgcttttgttcctcattgggcaccagtagctcgctttgctcgaacaacagatgcccggcagcatccttaagcttgccggcctcatcaatctggaactgcagcggggcatcgttcttgacatatccggcaggagccgtgatttctttcagagtatagacctggttaatcaccagatccttcaagatggcattagcgtctggtcccccggtggttacctgcgtaaccaggttggtagccgaagcagtattgcctttatagagggcgaaggtcgcgccgggtttaatcaccccgtcaccgcgcttccactggccaaaggacttattcttatcagccatgccgcgcacgcctagcttcgacaaggacaccgagcctttatcgttaaaaaccagaccaagatccccgaagccgaacgtcagattcaacccacggaattgagtacatcccgtggaacaagtcgtaatcgtaaagtcaatcggagcaatcggctgcaggtgacgatcacccggattctcggttaagcgccatttaccggcaggaatgccatagaactttacgtcaccgtcatcgttagagcgcaccgtcctcggagctgagttcggcacaaacatggtgccatcgttctgttgcaccggtagcggagtaatcgtgaactcgattcccgctaagggttgaccgttcttatccacctttttaaactcggcggtaccacgaatcggctcgactggataccatttgcccatgttggtaacatcaggcgctttaatctggtaggtgccggtagcagaatcaaaattagtcgcactaaagtcggtggcggacagcataaatgctctatcgcttactgcatacccggtcggagcctcgatttctcgcaccgtccaacccggggcggcattcacattcgtaaacctgactttgccgttagagccagagatagcggtggctttgagcgcgccctctttatcatagaggccaaacttggctcctgcgagcagtttcttctgcgctgactgtaagggctcggctttgtatccgtactttgtcagctcaatatttaccgccggcggcaccaaagtgttaatcaccgggttggattccagtttcccttcgtgagaactagacacgctccagaaatcatttatcgcctgcttacccaaatgttcttgggaaagcggagtcgcgcccttggggccggcaatcatcggtaccgtgatccgcacttcgctgcgcggctgctgcgggttggtattagtgaatttcaaccccgttaccgccgagcaaggagtgctctgccagttggcacgatccaggtcatatttcgtcgcgataccagtatcgcaggtatagaaggtattccaaccagtagcagccgttccatcagccatttggaagctgattcgcccgctgggatcatactggttaatcatggtggaacctttgcgggcaggagtacctgccaccggcagtaagtcatagaccaccggattttgctccgggcgcgtcccgtagcctaagcgcagctgataatcgaagttcgctcccccgacagttctaatctcggtaatccagggggcattgggcttgcgctcccgaatccgcttagttatgtaggtttcatccccaaccgcgactcgggtggtattttccgctttcgaccacgttcccgtacccgcaatcgggttcttcacttcatttaggtaacggacatttccctgcgcccgtacaaacgcttcgttaataatgtcaccgtcgataacaccattggtaatagtggtctctagttgtcccacactgtatacctggttcggatccgtgacttggtcggcttggaaacgaaccgctacgcgtccggtgccattgaagttggaaaggatctcataacgcgctccgggcagctccgcaaacttttgagttagcgtcacccggttaacttccaagcccttgggtagcacatctaccagctcgaaagcagtcaagggatcaccataatcggtttccagctcggcacccacggtataggtaccggttttaccggctatagttgccttggcaaaagtgttcactttacgagctttaagaactttgccctcgggcttcaccttgacatgagcctctttgatacgttctccgccctgtaccttatttctgaggtcagcttggcacttcagtccgttacagaggttctgattcgggtcacggagcttggtgtgaatcttggtaatagtgctttgtcccggctgcattgccttaacgctgctccaccgcaactggacgttctggtaggaggtaagattctccggcaggtcgatacggtcagttcccgtaataccaaccgaataaagaacttgataggtatccggttcaccagtgggactaataatctccagtttgccccctacaaacactgggtcgggagtaatagcggtgtattgtaaacggtcatcaaggtcgaagtccctaagatttagggtgacaggagtatccgatgtgttcctggtaagtacattccaatcgaattctgtattacgatcctgcttgctgtcgtagattaccgcgactccatcacggaagtgcggaccggcagcaaccttcgttaagggcacgccggggggtgcggtctccatcggtttatagaagctaaagtaagtatttgccgccccagtaattagcggttccttcggaccttgttcttcgggggtgagggtaaaatcggcgtggttatcaatccgtttttgtttctttgcccccgggaaatgcaacttcaagctccctagacctgagtattccgtggtcagacgtttttgggtattagtgtaagtgagggtgacctgatcgtcacctagcttccaccccgggttttcagaagctacgaactgggcacgcgcttgggtaccatctgtcttcgtatatagcggcaactggtcagtgatggtgtaaccccgcacgttccgcagcattttctctacttcaaaagtaaaggtgaccgcgttattgccagaggtgctgacgtccccttccggatcgtcatcgtagtccctgcatacagcaagttcgcatccgactgtatctttcttgaaggtaggcagcggatagtaacctttaaggttcaccggtcccggtttagaagccgggtgcggggtcaacacatactgcttcccatccgaggcggtatcaagcaattcggccttaaccgggaacactgcatccgaggcggtaatccgcttctttatacgccagtagataggaatacttgttcgtatggagctatcgtaattcggcctcagcttaacttctaggactcctggggcaactacctttactgatcggaagtattggctggaagtattatcccaatccgcaacttctacccgggtgggatcataagttatccggatggtcccattcttaactatcgaggtgccagcatccccaccgtaggtgatgtcagtacgcatattattgccgaactgctcttctagctcgttggactcgggccagcctggctggtttatttttccggtcaaattcagacgggcgtaagagcccgacaactcggcaggagccttctggtaacggaaaactatgtccttgtcattaccatctagctttatggtctgggtaggaggcagcgaatatcccttcaccatgggaggaactagcacataattttggttactatcgccctctcggctgttaattggacggttcatttccggagctaccggctgaccggtttgctgatcaaggtagcgtacccgcacctgggaatcggtgaggataataatgtcgttaccagatccagtagtatagccagaaatattattggggttcttccccgactcaggacgcagatatataggccccctaagaccgccgtaggtagtattagagccaacgccgtgtctaccccaacttatgtctgagaacatttttacggcatgttctagatgatcatgctgctgaccgctaaaaaacaggggagcatccggaaccgtaaacaccattcctggctccatcttccagctaaaagtagctggagcgatgacccacaaattaccaagagactccgggagagcggtgatattatttttatttttctctttgtctatatcttctgtctgcccgttagagatagaggccccaaagacctcagcataagggtcccagtcggagataggtgctccccgctcacgtccacctaagacacctaacttgccccaggaatctggtaacgccgtcaactcattattggcaaaagccccatagtggatttctgtaagctcaccccaggaactgggtaaagcctttaggcgattgttctggaaactgtaccttccgactacattaagcttgccccaagaaggcggcaaggaaactatttcattgttcaagaacgcgccacgcggaatagtggtaaaagtatcccagggggcagtgagagcagtgattttattatccttaaaactctcggcgccgatagtagcaacgctaccccacgagttcggcagaccggtgagggcgttgcccataaaagcctgagccccaatagtcttcaccttcccccaagaagaaggcagggattgaatctggttaatgttagtaccggattctgctccatacgggtaacaacggtaatcgggataagcgctatctttataaatgtttttaccagcaaaagcacaaggctcaatggtagtcacgctatcccaggtgggaggaagcactgtgagattatttcgtacgaaggagttctcaccgatagtggtcacccctccccaagcgggcagcgccgccagctggttatcgtagaaagcctgcttcgggatagtggtgatcttgccccaagaatccggcaaagaagttaacaggttagaagcaaaactactcgtgcctatccgagacacgttttcccaggaatctgggagtttaaccagtttgtttttctcaaatgcagaatctccaatgctggtaatcgacccccaggctggtagcgaggctatctggttatcataaaagacctgcgagggcagggaggtaatcttcccccagggagcggtcaaagcagtgattttattgtgttcaaaagaccctacccccagttgtgatacgttctcccaagaatccggcaacccagtcaactggttatagctaaatacctcttgacctaggctggtaatcggtccccactcgggcagtgaaactagcttattctccttaaatgcatacctgggtaaagaggtaattttaccccaggaatttggcaaggcggttagcccacaagaataaaaggctgtttctccaatcgaggtaacttttccccaagaatctggaagcgtcgcgagatttgagttcctaaaaaatgcctcctggccgattgaggtgatatttccccaggattttggtattgattgcaatttattcgcaccgaaaaccccctcattgatctcggtgagcaagccccaagaatccggaagtcgagtcaaggcaccacttctgaaagcattttttccaatagatttaacagaaccccaggaatctgggatttcactcaactttccgtttgagttaaaggctgattcaccaatcgaggtaacttttccccaagatttaggaagagccgtaagttgttgggaactttcaaaggcggaatcgccaatcttagcaactttgtcccatgatttaggcatctcggtgaagctgctagatgcaaatgcccggttgccgatgctggtgatagaaccccatgaatccggaatccgggtcagcgaagggtacatatctgaaaaagcattatcgccgatcgcggtaatatcctggcctttatctccgactgttggccagcaccagggatccttggtcttccctgccatatgcttctggttaccgtcacggctgaacccggtaatagttcccccgttgtaagtgaaatcttttacctgccaaccggcacaaatagttttctctggccaattcggacctactgccaccttgcctttaacggtcttagtgcgcccttgagaatcagtagcggtgtagtagacatcgtaggtggcctctggcacactggtgtcaattttttctggagagaccgtcagcgagtcagtaatgtctttgccatcagtgtcctccgcagttatccccgccagcaaggctgctttgcggccgtcgccaccttggggaatatgcttgacgatttctccgctgatcttgggtgaaaaatcggttttcttataagtaaaagtaacctcattgggcgccccggactgcggggtaatatcttgggtagccggagtcaccgcgtagccagccagttgcggcgccttaatcgtgtttttttcgcccgcgaaatagacgccatccggttcggtgaactcactttgtagcacctgcgggctgcgcaggggcttattagtatcagcatcgaggtagttaatggtgatcgagactgcgtcctccgcagccacctgaccaaagccggaatcgtacttttgagaagttactgcggccgggagcgaggactgcccgtcagctttttctagcaccacccagcgcttgttattcgaaaaaacttccttgccaaaggtggtgatggtagcgggaatcttcaccttttcaatctggttaccgctaaaggcatcctgccctactttttccagttggggcgggagcgtaaccgtagaaagctggttattggcaaatgcgctagcgccgatctcggtcacgtatttcggcagggtgacctcagttagtttattgtcacggaaagcgttcgccgaaatagtggttagccgccggggcggattttgcggagcatcctggcgggtgtcggtgatattcaccttggttaactggttatcgctgaatgcgccctcgccaatgctgattaccgtatccgaagtgaaagtagttagctggttcttctggaacgcgccctcgccaatagtttctagccccggagccaccagctccgtaatctcgttatcgtaaaaggcgcgatcggcgacctccgtcactgaagccggaagcgtaaccttagtgagtttcagccccgaaaatacactcgccgcaatcttggtgacgccatcaggaatggtcagttcgtgattattttgcagatcagttttacccgcatcggtcaggccagtaatttccgttccgttgtaagtgaaacgagggtcagtcgggggcacccccccccgcatcggatttgggctgcgaagtgccggaggaacgcccgcgctgggatcttcgaagttaaaggggactgcttggttgccggttgcagggttattagatgcggacggcttagatgaggacgggctgggtttgttggagtttgcagacggttttgtggagttgctgttactgggggtattagtactggttgagctggagtttcctgcattcggctgttctactgcgggcgccgttatcggcacaatcaccagcaaagtggacaacaacagccctaaaaccgaaagcgaagcaacaagccttctgctcaacacgttactcgtcacgctaataccccaaccacgggtcagccgtcatcattagcggcttaccctctgctcaacacattacatctcaatgatagtaaattaatattctttccgcaatggttcggaagatgggcatccttaaactgcttaggcgttcacgcataaaatgaaacatctctatatagaagcttccctaccctatatagaagcatccttatatataaggacaacccccccccgtaaatttcgccgccggagggtatttacgtccttggagggtgcttccgtcctaggagggtattcagtccgtggagggtaattacggctctggagggcgattttgtcgctggagggcgattccgccacattccaccagcattttctcccccgatgcgaccgttccaccctcccgagacaagatcaccctcctaagatatggaaaccgcatcctacatcacgtttgcctaacactccggagggcatttccgtccgtggagggtaaatacgactctggagggcggttccgtcgctggagggcgattccgccacattccaccagcattttctcccccgatgcgaccgttccaccctcccgagacaagatcgccctcccgcaacatctaaacccagccgcggcatctacaccacgccacagtatttcccgtccccaactagcaataagcgcaaaatatcctcgccggattatcgggataaggactttataaacaaccgttgcgaagctatagctatgtttccggaactaatcagcactcaggctttttcccggcgagttctgatgcaatctctggcgaatggcaccctgattaaagtcgggcgcggacatgttattaggccgctgaaatcggcagataaatggcaaaggatacgacacgtaaagctagggcaaatcgcttcccacgcggcgcgatgtaacactcccccagtgtttattggagtgaccgctgctctgctgcatggcctgtgcctaaaatcgctgcggggggacaccgctttacatacctcgactaggcattttgaaaagaaattgctgcccgcttgggtagatttagatacttccaaaggttgccctatccgcacaaaaatgccgccaactcccctgatcttccacaaaatcaccgtcccgaaaaattccgctaaatttatcggtcacaaaatgcgcgtcaccgatcttcccacgactacactgcaatgcgccgcctggttgcccgccggtagtgcgcaagcagtcgctgactccgcagctagaaagcttattccgcagtggaaccgccttgatcgtcgtagtcgcgaggctttcgcggatcgaattccaaagctgcgcgctaagatgacgaacctagcaaacaactatcggaagcggctcggagcgccccaggctcggcgaatccttgcaaatatggatccccgatttgaaagctatgcggaatctttatttcatgccgcatcacagttagcgcaggtaaaacggctaattccacagttccaagttaagatttccaccgctcagagctattttctagatgctgcgctcccgaagattcgcgaggcgtttgaaatcgacggaatgcagaagtatcaaagcaccgatcctcaaaaagctttcgaatccattcagggtgagaaacagcgccaaagtcagctccaaaaactcggatggcgcatttaccgatttacctacgaggacgtggcggacaccctggggtttgcaaaattcctgcgcgaaaggttaggtacctgctggaacggtgtgccacttctggccttataccgtttgaaaaaacccgcttttaatatgtagcggattaggtcaacttgactacattaacttgctgaacagctcttttataggtttgcgtcctcgcggggactatttacttcattcgctaaacggatcaatagcgtccccttatttctagctactccttactctttgcatcttttgttgcattcctttcgcccgcaggtcatacacatatttcgacctgtggagggcggaaacgtcctcctctataaaagccaagcgggcacactccctactgatagttagatatctgccctatctaagcgcttggaggttagatatctgacccaattaaacgcttggagggtggaaatgctgggacaatacacgcaagcaggaaatacgcacgacactagcgccctccacgcacaaaaacaccctcccgagacgtaaataccctcccggcgcaaaagttggactcagagatcagcggtaaaaacaccctcccgagacagaagcaccctccagcgcgaggaatggagaggggttttatagagaggagagggactttagaggggatcatcaatagctggagggcgagttcgacgctggagggtgaaaatgttggggcaatacacgcaaacaggaaatatatccgacattagcaccctccacacacaagaacaccctccaggagcgtaattaccctccgggcacagaagttgtagtcagataccgacaggtaaaacgccctccggaaacagaaactccctccaacgcgaggaaaagcaggccaaaacgcaacccggtgggagtaagcgggagtacgtgacactaagcgagaaaaagtgaggaaaagcgaaactaggaagagaaaaaggttgcgacccgagggaagttaagggtgaaaaaacgcgacccgagggaagttgaaggtgaaaaaacgcgacccgagaaactagcctcgggtcgcatgattttaagttttcgcttcgatattaatttttggttcacataaggctgtggttagagaacgtaatacctagtacagccagaacctcgagtaaccgcagctgccgttaataattagaaacggattacctggaaacccgaagagtaaatcggggctacctttacaacgtcaccaggtttgggggcgtgaatcagtttccctccgccaatataaatagccacgtgaccgggatgccacagaacgtcaccaggctgagcttggctaagcggcaacttggttcccgcagcagcaatagccgaatcggtgcgaggaagcgactttccaacttgcccatacacgtatttaacaaatccggagcagtcgaagccgctgggagtggaaccgccccatacataaggaacgccctgatactgcatagcaatccccaccacggtgccatcggcaggacctaaatcgcgccccgcgaaggaagaggattgtgaggaggcgggctgagctgccggagcaggagtatttacctgaacagaggtggcagcctgggcgactttatctgactcagaggtaacaggctcattaacagtcagcttttcaacagtgcctttcgccagctgcgcggagttaaccgaggtggcgatgcgcttggcggcggtggcgtcggcgctagcgggaacggctgctgccgctactacggttagcgcaacccccgagccggccagcgcagataggcgcttgccattttcggaagaaaatacagactgggcaaactgggaaaccggagtggagggacggctcggagcgcggtgacgcgctttcagcttctgagtcacgataagggttctcctgacagtgaaagttctctggccgatcaagaaagcttcttgggagctacccaggaaaccgtcctgaccgattggtcgtatccaaatataatgcttcgataacgaaatgtcacgttttggttacgaaagttttttaatctttctcaagacctcggaaaccaagtggccagacccacaaaaatgcgcaccctcaataactagaaaatcagccctaataattcgctattatcccagctcaaaacaaaacttagacaggtctaatccccctgggagaccccttcgacaaacaggtgctgccctaaagaagtgtaaagtaacacagtttttcctgtgtcaaccccgataaccgacacctgatcgttctgaggctgcagattcacctcgtgaccaggcaaaataccggcctcatcaaagaaagccagcattcggggctccgcctgcagaggctcgccaatccgcaccactttggtggccacaataccgccatactgctccacaatctgcgctgcagaggttcccggccccaccaaatcgctatcagcatcaggaatcgggttgccataagggtcagtagaaggatgatgcagcatatcgagcaggcgcatctctaccgcggaagacatcacgtgctcccagcggcaggcctcatcgtgcaccattacccaatccaaaccgatcaaatccagcagtaacctctcggccaggcgatgtttgcgcaccacttcccgcgcgagggcaacgccctggtcagtaaactcaatccggcgattatcagccacaaagagcaaatcatcgcgctccatgcgcgccacagtttgagaaacggtggggccggaatgatccaggcgctccacaatccgtgcccgcagcggcggcaccccatcctcgagcatctcgtagacagttttcagatacatctcggtggtatcaatcagatcgctcatcaatgccccttgtgccgtgtcagtcgcggaacctgcgcccgccattattctcgcccagcctcacattgcccggctaacccaggatatggcgcttaacgcaaagtttagacgcaaacgcgattaccaagggcgttttggactagattcgcggaggtttgcgcacctagagtaaggtttgctttatggaaaactttgtcagcattcccgaaaatttattgcccaaaaataggaaattcggatccggacctagctcaataagaaaaactgcccttgcgaaagttgccgccagcgacctgcccggcacctcgcaccggcaagccccagttaaagacctggtgggttcgctgcgcgaagggttaaaagaattatttgccctcccggacggatacgaggtagtgctgggaaacggcggcgccaccactttttgggcggcggcggcgtcctctttaattagggaaagttccgcgcacgccgttttcggctcctttggcgctaagtttgcggaaaccgtcagcggggctccgcaccttaaagacccggcaatagagctcgggggcgtatcggcgagggcgcagggccgggaaaccgaaagcgaaatcgcgcttttgcggggcgggcaagagggaatcgacgcctattgctatcccgcacatgagacttctactggcgccctcagcccggtaaagcgcattgagggaggattaaacctggtagacgccacttcggtcgcaggcggggtgcaggtcgatatttcacagaccgacgtttattacttctcggggcaaaaatgtttcgccgccgagggcgggctgtgggtggcgctggcctcccctgccgctcaggaacgggcgaaagacatcaaagcaaacccgggtgcaggacgttggattcctccggtactggatttttcggtggcgctgaaaaactcggttaaaaaccagactttaaataccccggcgattgccaccctgattttatgggaagaccaggtgcggtggatgctggcggagggcggcctggaggcgatggaaaaacgcacccgggcgtcctcggcggtgctatatgagtgggcgcgttcccacccggacgcctccccctatgtgtctgccccggaagagcagtccccggtggtggtgacgattgatttccacgatattgatgccaaccaggtgattgcgcagctgcgcgctaatgggatcgtagatatcgatccttaccgggctttgggacgcaaccagatccgggtggcgtgcttccccaatgtggaagtggccgatacccaggcgttaactgcctgcctagactacgtaatcgaccgcctgtagcggccttctttagaagcgggtgcagctacctgcgcgctaggcagcactaaagcaccctaccggcgcccgctaggcaacactaaaacactcttataaaacaaatagtccgtgggagcagcctggccactcccacggactatttaaattccagaccctttacgacagcagggattggatcggcccgaggcagaagtagattacgaacaggatcgaaactatccacatcagggggtggatccgcgaaatccgtccggaagcgatcttgacgatcacataggtgatgaaaccgaacccgataccgacggtaatcgagtaggcgaacggcatcatcatgatggtcatgaaggcgggaatagccacgtcggcgcgcgtccactcgatatcgcgaacattcaccatcatgaggaagcctacgaacaccagggcggtggaggccgcctcggcgggaaccagatccactaccggggcgataaacatggaaaccccgaacagcaggccggtaactaccgaagccaaaccagtgcgcgcgccctcgccaaccccggaggtcgattccacgaaagaagtgttagaggaaacgccgcccaggccaccggccattgccgaaagcgagtcaatcagcagaatttcgcgagtcttaggcggattgccgttctcgtcgagcaggtgcgcgcctgcgcctaccgccaccatagttcccatagtgtcaaagaagtctgcgagcatcagcgagaagatcagcagcactacccctaccgcggtggtgtgggggttggtgaaagcgccgaagaaatcaactgcaccgatagtggaaaaatcgggcagggaaaccggggaacctttaagctgcggcacgttagaagcccaggcagataccgccttttcatcggctgcgcgcgaacccaaatgggcaaaagcctgcacgatgaaagccaaaaccgtagcgcccacaatcccgatgagaatcgcgccttgcactttgcggatataaagcaccacaatcacggctagaccgacacagaacactagcgctggccatcccaccagggagccgttcacacccagctgtaccggagtgcctccaggacgaataatcccggcatttatcagacctacgaacgcaataaacagaccaatacccacgctgatagcggtttttagttgggcaggaaccgctttaaacacggcctccctaaagccggtcagcaccaggatggtgatggccacgccctcccaaaagatcagccccatcgcttcctggtagctgagccccaaagcctcggggttcgccaaagtaaaagccaccacggcgtttagtcccataccggaggccaaagccaacgggaagttcgccactagccccataagcagggtcatcacgcaggccaccagggcagtgccggcagcgatagaagattggctaatacctttgggggcggcgttccccaaaatcgcggcgttaaccaccaaaatataggccatcgcgaagaaagtgaccaggccaccgcggacttcccgcccaacggtggagcccctttcagaaattttaaagaaacgatctaggaaactattcgactttgtcgccgtatcttgagaagacaagataactgtccaatccgccaccagggcatagaagttacttacaagctcattatcggaagattcccagggtttttccaatcttgaccgctatctgcgacttagttgcaaatttcatccagattgcctacgccgcaaccaaagcagccctagcgagattccctagacctgttcgaaaattccttagcctcctggtcagagctgctagtcctaaccgctagcgggcaatagctaggacgcaaacacagtcctccagcctcaagccgagcccctagccagagccactactcccctagatatccacctgttctacgtcgagttcatccaggcgcgcgggcgtgggctgccaaggggaggtatccactttgacgtcagtttccgaatgcgagccacaggtgtgatccatagaaaccacccggccatcgtccactgaccattcattggtgcacaccccgaacatggtgcgcatactgcctgctaccttcagtaagaagccacaggttgaacaggtattttctggaagcttcttgcgggtcattccccgccgcccaggaccttgttcggagttataccagcgtttagcggcctgggcacgaccgcaagccgacagtacccgggggcgccccagtcccagttcctctagggtgcgccgatcaagatcttcgggattggtgtccgcataggactgatcgaggcgctcgtcatcgggaacgtaaggtagcacgtcctcgcgttttatgtcttgaggacgcagccgctctgcccaaggcacccagggacgcgccaacaacgcgtcctctcccggaagtaaatcgacttcacagacggtggctttgcgtccccgtggcacccgcgctaaaaccgccacccaacgccagccgcggtaacccggctttaaacattcaaaacagtgggtgaccaggcgttcaccctcgttagtggcgctcaaatgttcgccaatctcttccggtttcgcaataggcgcaagcccttcgcgagcaatatcgaccgcgctggctagtacactatccgcttttccggttttacgccgggtagtttcactcatgtgcgtctttcttaattcaccgccactactaggcatcgaaatcatcggcaactgcccgcagcagctgcgcgatcttcgcaccattttccgggtagcgtccatgccgcaaatgcccggaggaggcgtccaataacttaatcaggtcttcgactaccggcaccatggccttgggtttacgccgcaaattttttgctactgagggcgcgcgctgcaagatcttcaccgatagggcttggggaccgcgtcgcgagtcggcaacggaaaactctacccgagttcccggtgcaggaggtttagtgtcagcaggcaatacgctggcgtgtaagaacacctgcgagccgtcctctgcggtgataaacccgaaccctttgtcggcatcaaaccacttaacttttccgcttggcactgaaatctccctactttttctaaatctaggttacatgaagcaacatataacccacttctttgcatatgataatgcaaagtggggatttaatctgctccgggctagcctcattagttagggagaaacttacgtgagagtcttaaagaaagccggtttactggtaatagttcttctagctgcgcttttcgccagtttcgtagttactggaaacgttgcttacgccgaggatccgcctaaaatttccgatcacctttatgatccaggaaataaaatgggcaaacaggccgagaaagtcaaggaacgtctggcgtctttagatcgctcgggactgcatgtttatgtggcgttcccatcggagtattccaatgacaccgtcagcaactggaacttgatggcgctacaaaagtcgggggctcctcagggctcctatatgctctcgatagtggctgataaccctaatcagaccatgtatttggcttctgcagataatgccgcgaaactctcccaagaagaattgtctgcgatagcctccgataaaatggtgcccctgctcaatcagcaaaaatatcccgaggcagttttagcttacctggatgcgctttcagcgaaagcaccggaaatggggtcgggactggcggttgccccctgggcgatgattgctttcctgatcgccctaattgtggtgatcatagtgatttcccggatgcttaaggcgcgccgtaaagctaaggatcacgccgaggaaagagacaaagcggatgttttggcttccgaggcagcggccagcccggtggtaacgccggtgacagctacaccagctaccgaggagcagactgccccggcaccctcggttcctgctgctaccgaagcagaaagtagcgaggaggatgagcaaccgcgcaaacgaaagtttggattcaagtttggaggcaagaaaaaggcgaaagcctccgccagcgattcacctctgccagaagcatcctcgaccccggcagctgcccaggaggaggcagttaccgctgctacttcacctgctgcggctcccgttaccgcggcggccacgccccatttgcctgaggttagtgcgcctagtgcgcctgcggcggtttctccccagccggcaagcaccgctgctgcttttaaaccgcaatttggcaaagttccttcacttgcggagctagatcaaatcgctttagcacggacgaaagctgcttctcaatcacctgccggaactaccggcagtggtcacgcccctgtgcaatctccgcaggcgccacaggtgcgggaggtaccgcaggaggcgccacaagcgccggctctacaggggcaggcaccagttgcgcagcaaccacaacagttccagccgcaggcgccacaagaacaaccgcaggtacagcaacccccggctacgcaaccaccgcagccgcagcccgtagcgagcgccccacaaacagtaacgcccggttcgtcgccgttaccacaagcgccggcctcatctccgctggctgctaccgccaccccggcagtgcccacggcggcgccaaccgtgcaatccccgcagatgtccgcgccgcaagcgcacagttccgtcctacgtccgggagcgaccacctatttgccaccggaagccaatgacgatgacactcaggttacttccgccgcgcagattaaagactatggtcaagaacgtcgcgacgagattgcccgcgcgaaagcccgcgcccaggcaattaaccgtttccgccaggaacaggcgcataagcaagccgcgcccactccagagcgacccgctagctatcagccgggtttgagccccctgccgacaacccccagcccccagcagcaagcggctgttccggtaacgcctcccgcgcaggtgccttcccagcccgcgccgcagccacaactgcccacgcaggtggcttcccaggttgtatctccggtagcgccgcaggaaattccacaggtatctccgcagatgacagctccggttccgggaggcgaaagttcgcaggctcccaggcaggcacaggccgccgcgccctccggcccggagccgaccactgccccgcagacgattccgcaggtcgttccccaagaaacgccgcgcgtggaaccgccggtaaccccgcagactccgccacaggcagctccgccggtaactccgccggtaaccccgcagactccgccacaggcaagcgagcgcccggcagaacccggcgcgcaaccggactttacgaaagtgctgcggcaggccgattcctgggctcgcaagggttccagcaagctggcgctggcacaggaacgctttggaaagagcatcacccagcccttcgcattggcgctagtacgcgcccaagatgccgtccgcgccgcctttgcggaatttgctactgcccagctgcagtcacggcctattgatcagcagattgtggccggtaatttgccggcacctttgcgggagctgcgcgatcagatcacccactttacgaatctgtatcatcagcaaaccccgctgccggatatcacccgcagcttcgagcggcagattattgaatgccgggaagacctggtcagatgccggttgattgtggagcgcatccagaatgatgacccccaaaacgctactcgcatcggcgaggacgtgatgggggcgcataaactgctggcgcgagcacagaacctgctggaagaagccaagaccatggatcgcgcggggcaggaaaacgaggtactcaaagccacggtccgcaccgagaaccttttgttgcaggggcgtaaaatcgcgcggcaggcgcgcgccgaggaagccgctctccaggcggcagaaaaagttactcaggctttgaccttcgaagaaaaagtggagccgcttagcgagcaggtcgctattttgatggcggcagtcgatgactatatcggagtgcacaccgctaaggtaggagtagctgcccgcaccatgcttgacctggcaaatcgcactttgactcgccttgatcggccggggaatcacgacactcaagaagccttgcgcctcttgcaacgcgcgaaacagcagactgagcaggccttgcgtctggcagaaaatgatgtggcaaagcggagctaatcagggctaaaccgcactagtagtagggtgaaacggagctagccacgcgaagccgcgaaagcctcccctgacagccagatttctgcgcctcggggagccagcgcctcctgaagccgataggattagaggtatgtgcttagctcgattccgcaaacggttattggcatcatttttcgcggcgctgctggggatgtttttcacggtagcaccagcgagcccggctctaggcgatgcgcctgcggaaagttttgacaaccatctatccgacccgagtggatatcttgacgattcgcaggaaacagctcgtgccttaaacgatgcctccggcgggggctaccagctctatgccgccctcaccgacaattttgcgcccctaagcgcgcaggaatggtgcgtcaagagtcgaaatcagggcgcgggaaacagccgcagcgtgctgctagcaatcgcggtcaaggaacgcgcctactatatttgccccagtgacgatgtcagtttcagcgccagcaggcaagaaaggattgttcaaggaatagagcccctactttcccaggaacaatgggagcaggcagttaaagtctttgcatccagcgccgcttcctcctccgatcttagcgatgccggaagcgcgggagattccggcgtaggggaatccgcgagcacgggcagctggttttggctgatagtccaagtcctggcggtagtgggaatcggagtcgggattattgccttcgtccgaaaacaaaaaaagacccgcactcaaataaaaaccaggcaggctgcctcggataagcagattgtagagcaggcagggtcagatgtattggccgctgacgatgccattcgaggtgcgaaagaagaactagagtttgcgaagatgcagctaggggcggcacaaaccgaggaatacgcccaagtgctagcgcaggctacccaggcgcgagatagcgctatggaaaagttggcgagtttagattccctggcgggtatcgaaaaatcccaacaggcgcaagctgcatctgctgaggctagacactgcctcgaactgttgaagcagcaggcagagaaattagcgagtttacgcgaatctttagattctttgccggcgcggattaagaaccagttaacgctgattgcagagttagaaacccaggcagagcagcttcctgccatcatcgcggcgctgcataagaaccacccccaggcggtattaacttctttagatgacgcccccgagcagatcagaaaccttttgggagccgcgcgggaaactttgcaaccgctgctaagcgagtccagctctcccgccctaaaagtgcaggtgcaaaccgcggagcgagcgattgcccaggcacgggccttgataaaagaagtttctgaggccgagggacagttggcgaacttgcaacagtcactgctggcggcagtaacctctatttctgctgatctcgacgatgtgaaacggctggaattgcaggataagtcgatttttcaaacgctttgtagcaaagcgcaagccgagattgataactgtatgaaagcccgagatgggcaaggtgaccccctggcggcgctgtccgcgattgcccaagcggaagcagatttggatcaggcgctggcgccctaccggcaagacagtgagcaaaaacagaaggcagcggcgagattgcagacagctttggatagtgcacagagacggattgccagtgcaaatagctacgtttctagccaccggggagcggtaggtttggatgcacgccagtatcttgcgcgcgccaaatccctttaccagcaggcacaggaggccagaggagataccgggataaagctggcggagttggcgggagaagctgccgatcaagcccgggacagcgcgcaggcggactaccgggagcgccgcgatgactggggcagccggccgggaggtggtggtagcgactttctaaccggaatgattctgggtggaatcctgaatggcggtcgcggaccgggaggcagcagctggggcggcaatagcggcagtttcggaggtggcttcggcggcggaagtagcagtggcggtttcggcgggggctttggcggcggaggcggcggcttcggaggaaagttttaaccggcgaagcgcccagttttccggtaaaattagaaaagatactcaataactaggaggaccaatggcagaaaagcaaacgattctgggacgaattaccaatatggcgaaagctaatatcaatgcactcctagaccgggcagaagatccgggaaagatgcttgaccagatgattcgggactataccaactcgattcatgaagctgaaagcgcagttgcccagaccgtagggaacgtacggctggcagaaaaagatttagaagatgatcgtgctgccgcctcccagtggggcgaaaaagccgctctagcgtcaaagaaggcggaagaagcgcgcgctagcggggatgctggcgaggcagatcgtctcgataatctagctcgcttggctctgggtaaacagattgattttgaggagcaggtcaaggcgcaagaaccgctcttggtttcccaaaaggatatggcggagcagcttaagcaaggcctggccgggatgaagaccaaactagaggatcttaaagttaagcgcgaccagctggtggcccggcaaaagaccgccgaagcccaaaaccaggtacaagaaaccgcccaaaagtttaacctcgcggatcccaccagtgaacttaaccgtttcgaggagaaaatccgcaagcaggaagccctggcagccggacgcgcggagctggcttctgaatcactagagaatcagttcgcggagctggaaaaatccggttcctcggcagagattgaagcccgactagcggctttgaaaaacaagtaagtctcactaagacagacagctttaatacctgttgctggcgtcagaattttttctggcgccagcaatgttttttacgttaataggatctgatattccggagcactaccaggatggaatctgcgccgcgccggtaacgatcgccacccctgccagtaagcacgcaaaccctaaggtcaaacggtattcgcgcacctggcgagtaagaatggggccgagcgcgcctcccaccatggaggtgagcgcaaataccgtaactactaccaggtcgatatttaggggcgtccctatccgcgccagcagcgaagatacacaggaaatcaccattataaacagcgaagtggccgctgcttgccgcatattaaggtgcagcaaaatcaccagtgcaggcactaccgcaaagccgccccccaccccaaaaaatccagtcaagaaaccagtaaccagcgctgccagtacccatttaaataggggactttgaggttgcactttatccgccgctacctgcgcagaagcttcgggactcgcgtcagcgccagtgctagcgttttgtgcgaaaacctccgcggcgtcctcctgcaaaattttgcgaatcttatcgtgatactgacgcctggccgttaatcctcgtcgagccatagcgatcgctaccgctgccgctagcagcgcaaatagcaacatcagatagtttccgggggtgagggcgtttaccttgctgccggcaaccgaccctgcggcgctaaaaaccccaaatagcagccctttcctccactgcacattgcccgaacgcgcatgcggaaccagggaaactagggcggtaagccccacgataatcagggaggcagccgccgcctcgtggggggaaaagtgcagcaaataaaccagcaccggaatgaataacattcccccgcccgcacccagcgcccctactaccaggccaatcgctagcccgatggcggcggcaagcattaaaaacatggctatttagctttgtcgtattcctgcagcgagcacactccgtaggtgcggtcgcgggtagcttcaatcgcctgtaccgctgcttggaactgggaaatggtggtgataatcggtttgtcggcggcagtggtggcggtgcggatttcgtagccgtctacccgcgccccggaagtgccgggggtgttaatcaccatgtcgattagcccggcgcgaatcatatccaccaccgtttgttccccatcaggacccggcccttggctggctttacgcacttcggtaaccggaatcccgtagcggcgcagcaaagcggcggttcccgcggtcgccatgatggagaatcccaagtcaaataaccgggataccggcaaggctaaggaacgtttatcctggtcagagaccgacacgaacacggtgccggcggtgggtagattcccataggccgcggtttggctcttggcaaaggcagtggggaaatcccggtcgtaacccatgacttccccggtagaacgcatctcgggcccgagaaccgtgtccacgattcgaccattcttgtcccggaaacgtttaaatggcagcaccgcctctttaaccgcaatcggccgtccgggcgtagcgaaatcagaatcatctgccggcagatagccgcgctcttttagctccgcaatcgaagaacccatcatcactaaggcagctgccctcgctaagggcactccggtagctttcgctacaaagggaacggtgcgcgaagcccgcggattagcctcaatcacatataacaccccgctaaccagggcatattgaatattgatgaggccgcgcacccctactccggccgcgattttctcggtggaagtgcggatatgggaaataatcgcgtccgagagagtgatggggggcagcacgcaagaagaatcgccagaatgaatcccggcctcctcgatatgttccattaccccgcccaggaacagctcctggccatcatagagggcgtccacatcaatctcgatggcgtcatcaaggaaacggtcaatcagcagcggcccggtcatcactgtgggatcagataggttatagcgatgcaggtaggagtcgagttcttcggcggaatagaggatctccattccgcgtcctcccaacacgaaagaaggacgcaccaaaaccggataaccgactttttctgcctgctcaaaagcttgctccggggtggtagcagttccatgcgccggagagggcagccctgcctcgtcaagaacccggccaaaaagttcgcggtcttcggcggcgtcaatcgcgctcggcggagtacccacaatcggcaccccggcagctttcaaacgcgcagctaaagaaagcggggtttgcccacctagctgcacaatcatccccgctaccgggccagccgcacattcggcctcgtaaacttccattacgtgctcaaaggtgagcggctcgaaatagagccgtgacgaaatgtcgtagtcggtggacaccgtttccgggttgcagttgaccattacggtgtcatagtcggtttgcagttcctgagtggcgtgcacacaggagtaatcgaactcgatcccctgcccgatccggttcggcccggatcccagaataatcaccgccggacgctggcgcggtttaacttcgctggtcaggtcataggtggaatagtagtagggagtttgggcggggaattccccggcgcaggtatcgaccgttttatagaccgggcgaatcccgaaggctttgcgcacttcccgcactacctcatcggatacggagcgaatctgcccaatctgcagatccgagaaaccgtgacgtttggcttctaccagcagatccgggttcagtgcttccgcttcccgaatcttcactgccacctcgttcagcaagaacagttgatctaggaaccagcggtcaatcttggtggcctcgtagagttcttccaggctcgcccccgccctaatcgcatccatcacctggattaggcgtttttctgtaggggtcttgacctgctctaatagctccgctttcgaagaagcaagcggggtgtcccagcggaagtaagtgcccgctttatccagggaaatcagggctttttgcagggcttcggtaaagttacgtcccagcgccatcgcctcgcccactgacttcatggcggtggtcagcgtggggtcagccgccgggaacttttcgaaagcaaaacgcggcactttgacgaccacatagtccaaagtgggctcgaaagaggccggagtcgaaccggtaatatcgttgggaatctcgtctagggtgtagcccagagccagttttgcggccaacttcgcaatcgggaaaccggtagctttcgaagccagcgcggaggaacgagacacccgggggttcatctcaatgactactacccgaccagtatcggggtgaaccgcgaactggatattacagccgccggtatccacccctacttcccggattacgttaatcccaatatcgcgcagattctgcagctcccggtcagttagggtgagcgccggcgccaccgtaatggaatcgccggtatgtacccctaccgggtcaacattttcgatagagcaaaccacgaccacgttatcggccttatcgcgcatcagctccagttcgtattctttccaccccagaatcgactcttccagcagcacttcggaggtgatggaatcggccatgcctcccccagcgatccgaatcagatcctgttcgttataggcaataccggaccccataccgcccatagtgaaagacgggcgcaccaccagcggatatcccaactgttcagcggcttttctgcagtcagccaggttgtgagcaatgaaagatcgtgccacttcggcgccgcaacggtgtactacctgcttgaattcttcgcgatcttcgccggcgttaatcgcctgggcgctcgccccgattagctccacctggtatttttccaaagtgccatcttggctaagggcaatcgcggtgttgagcgcggtttgcccacccaaagtcggcagcagggcgtccgggcgttccttggctataatcgaggccactacctgcggggttatcggctcaatataggtggcatccgccatctgggcatcggtcataatggtcgccgggttagagttaaccaaaataactcgcagcccttccgctttaagcacgcggcaggcctggctcccggaatagtcgaattcgcaggcctgaccgatttggatcggcccggaaccaataactaggacagatttaagatcagttctgcgtggcatttttttccttcgtttcctgcatgattcttaggaacttatcgaatagatattgggcatcgtgaggaccggccgccgcctcgggatggtactgcacgctgaaagctggcaggtcgagggcgcgcaagccttccactaccccatcgtttagcgccaggtgagagacttctacccgcccgtagcgtcctccatcgaaaggagccaccgaaggatgctccgccggagcgtccaccgcgaacccgtggttgtgggcagtgatctgcactttcccgctttcgcgatctaccaccggctgatttaccccacggtgaccgtaggcaagtttataggtgccgtacccgagagcccgtcctaggatttggttgccgaaacagattccaaagaaaggaatacccgcgtccagcaccgccctcgccagggctacttcgtggtctgctgaggccgggtcacccggtccgttagagaagaacaccccatcggggttcactgacatgatgtctgcaaagctggattgctgcgggaaaacatgcacctgaatcccgcgcagcgccatctgctcgggggtgcgcgctttgattcctaaatctagggcagccaccaccgctaaaggctctttaccctcatattcgccagcgggctctaccacgtatttttccggagtgctcacatccgccgccagcgcggcgcctgccatcaccggctggtctcgcactaccgaaaccaagaggtcgcgggtggcatcatcaagataggcggcacctgccggaagcgcctcgccggaaaaaattccgccccgcatagcaccgacttcccgcaaatgcagggtgagggcgcgggtgtctacctcgcagatccctactatttcttgggcttttaacaggtcttccaggtcgccggtagcacgccaattggaggcgcgccgggcggcatcgcggaccacatatccggctacccagacccgacccgattcgggatccacttcatttacgccggtatttccgatatggggagcggtttggataactatctggcggtgataggacgggtcagtcaaagtttcctggtacccggtcatcccggtcgcgaataccacttcccccagggcgcgtccccgcttgccccaggctttgcctttcgcgataaacccgtcctccagcacgattaaggccagatccgaggaggcctgctgcataagaacttctccttatctatgcctcacccaggggtaagggcatatagaaaaaattgcccgcaccgagggggcgcgagcaaataggtaagagtttcactgcccctaatcatagcgtaagcgcccgccccggcgtgattcttgttcaccgcctagtagctataggagaggtacctactgtgagagcgtgcctgctgttagctaacgcgaagttgtttctggagggtgattctttcgccggagggtgatcccgttgccagagggcgattccgtcgccggagggcgattccgttgtcagagggcgattccgtcaggtaaaaggcaaacaagcgagcagttgcgccctccacggacaaaaacaccctccagcgcggtaaaaaagacccgaatctagcggctccaccacaactcgggaggatgatcttgtcgccggagggtgattcggttgtgggagggtggtttcgtcaggtacgagggagaaaagcgggcagttgcgccctccacggacaaaaacaccctccccggacaaaaacaccctccccggacaaaaacaccctccccggacaaaaacaccctccagcgccgggaaaaagcacgattttcgcgcccctaaacaccaccccggagggtgattccgttgcgggagggtaatactgtcgtgggagggtgctttagtttaggattcaggctctgccagcaaagattgagattccgtagtcaggattcgtcgataaaaggtgcgagaaaaagggtagccccggcggaaaatccgccagggctaccttaaatctctaggtaactagatagaaaacaaagttacttcatccgggtgccgacggagcccagacgctcacacgcctcgactacgcgcgccgccataccggcttcggcagctttgccccaagaacgcgggtcgtactgcttcttgataccgacttcgccgtctaccttgaggacgccctcatagtgcttgtacatccaatcagcgatcggacgggtgaaagcatactgggtgtcagtatctatgttcatcttgataacgccgttctttaccgcagtggcgatttcttcggcagtagagccggagccaccgtgcattaccaaatcgaacgggcgatctcccttgccatacttctcgcctacggcttcttgaatctcgcccaggagttccggacgcagcttaacgtgtcccggcttgtaggcgccgtgaacgttaccgaaggtcaaagcagttatgtagcgacctttttcgccgaagcccaaagcctcagcagtcttcataccatcttctggcgtggtgtagagcttctcgttgatttccccaacgatgccgtcctcttcgccaccgacaacgccgatctctacctcgagaatggtgttggccttaaccgacagttccagcagttcctgagcaatttccaggttttctttcaacggaaccgaggaaccatcccacatatgggattggtaggccggcaggcgaccagccttgacctcttcggcttctagctccattagggggcgaatccaggagtcaatgttctgcttggcgcagtggtcagtgtgcaaagctacagttaccgggtagttcttggcgatttcccgggcgtaggcggccatagccagggagccggctacccgatctttaatggtagcgcccgaccagtattcggcaccgcctaccgatacctggatgattccgtccgattctgcctcggcaaaaccacgaatcgcagcagttagcgtctgggaggaagtaacgttaatcgcgggataagcgaacttgccttctttcgcgcgatctagcatttcgttataaacttcaggggttgcaatagccacaggggccctcctttaagatagacttcttacgctttcattgtctcacaaggtctagctgactgcagggtcttgtgtcccaaatctttgtcacccacatctcaaaaaccaggtgtcacctctcgcagcatcagttgcgatcgggttgggaatcaaacgttttcccatccgatttttgttttgtctcatttgtcagccagagcgctaagttgcccaccatatctactcatcgcaactcagttaagtgatagaaaaaatatatgattccccaacctaaaactaatcgtttgttttcccgtttaggactgttaagcataataatcctgactttctcgatgctttcagcttgccaaagcgtcagtcttggcggctcgtcctccaaggaaagcgactcatacgaccccggtaactatcagcgactgccctatcaacaattagctgccgagtacgaaaacggggcggccgaagcttggcgtacccaaatcacccatctcaaaggaacgcagataacaccattcgtatcggaagatggggaaacggtagcggtcgccctctataccattcctaatgaaaataaaagcggagttttcagcatcaccggctacgatttagccagcggtaaacagaagtggcataaagattttgatggtaacgactctacgattagcgccattgatcagataggtcccgaggcttgcctgccccaaaccttccgtaacaatatcgtttgcaacaccggattgatagatatttctaccggagaggtcgagagtctgcccgaggaggcgttcgggactttccccggctcggagcaagagacccagcagctgcttttcaataccaatgacctggcggtcttgtttcattaccagcgaaactcaactagtaacatttcggttattacccctgaaaataaggtgctctggactaagccggtggcaattttttcagcgcaaggaatctctcctatctgccgatttgccgacaaatctgcagtctgcgctaacccggatggaaaagtacagatactcgatctaaaaactggaaaggtgaagaaggagctcacccaattaaaagaggatcccgacttccacatgttcaatgtcgccctacaactagatcccgataacgaggaaatcatcttatgtattccaggggcagattcagcatgcgaaaaatacaaggcagatggcactcagattgactctgaggactttagccttgagatggctcgtcgcggcgcggttactcatgatcccatgcgggtagagaagttgagttacccggcgactaaagagataccggaaatcggcgctactaagagcgtggaactcactggccaagaccaagataaacaagaaattcgtgccaccaaaaccagtgatagccaagatctgtggctcattaaccacagtggttacaatcagtggcgagccagcggaggctaccttttcttggcaactgccagtggaaccgctaaagatgcgaatgatcctgacgacaacggagaatatacggacagcattactacagatttcgtctttattcctcctcttagcaagcaatacgaagtagggaaaactacttttgggagcggcaagaacggtacccgggtacttcgtgccggcagcttcaccggtagcggagacggtgacctgatcggaggcgcagctgagggggttgtgaaggccgggaacagcgccaatggtggaaacgggaaaggaaagtacgggaaatactcctcttcttcgggaacccgactgggggaaaactacctagagaattcaggagcaaagattcccgaactacccatacgttcggtagcaatcgccaatatcgacggcgtatcgtcctcccaaatccggcttactcaacagttctttgatgatttagccgccgggaacttagagagaatccgtaaatcctgttggactatgcctgcagaagttatggacaatcgctatttcaatgaccggctccgcggcgcgattctgcaggccggggcagcaggaggacgcgttgtagatggcggtgctgaatggcaaggcaaatatgtttcagttatgttctcgcaaccggaactgaactctaactatccgtgtcccgcgattcgggtaggcggaaaaattgatgcgcttagccccgcggatgccgtccatgtggccaagcgggtagtgggacaaatcgatgggcaaccgattcatgtccacgatgacggtcgctacgaaactgtgtgtggagcttctagctctagccaagtaaagagcgtgacacagggaggtttagtctccaagatccgcgagatagccgctggtggcggagtgtccataaaaccgctaaagcagcaaaaggacgatgtgctttatagagcaaaaagtggcagcgctaccatcaccttgcgccagcatttaaagaccagtacttactgtattgaaccgcgttaggaacggcggtgctgaatcacccacgcccacatggctactgccgcggccgcgcctacgtttatggagcgggtagagccatattgggtaatctcgtaaaccgctgcgcattccgcgagcatttctgggcttaaaccgttcgcctccgacccgaaaaccaggcaacagttctccggcaaaaccgcgtcctctagcggctgggatccctccacattgtctatcccaatcagggtaacccccgccgagcgcgcccaatgggcaaaagactctgcatccgggaaatggtctacgtgctggtaacgatcggttaccatcgcgccccgtttgttccagcggtgcgcccctacgatatgcacggagttagcaccaaaggcgttagctgaacgcactatggaaccgatattgaaatcatggtcgaggttttcgatcgccacctggaaagggaaacgttcactatccaggaagtcccgaatcgcatcccggcgccaatagcggaaacgatcctccacattgcggcggtcaccttcctccagtagctgcggatcccaatgctccccctctggccaatgctctgacccgcccggccaaggaccaaccccattacccataggcttagactttaaaccggtcacgctgtaggtagcccgtaaagcggcacactagagagcggggagccttccaggttaagaagctcatgaccttaaagattacggaaggtaccgaaataacttttccgcgtgccagatcattcaaggcttgctcaaccacatattccggggttagccgggcaatagtgggcacgtcctcgatcttggtagtgatcttgctaaagaagccggtatcggtagtccctggctttagcgccataacctgcaccccactgccgcgcaactcctctgccagggcgcaactgaaaatctctacccaagttttatgcgcggcataggtacccatggcagttccagacgctaccgaagacacatttaaaatcgcaccgcgtccgcgccggcgcatcctagaagccgcggtttgggaaagcagcataactgcccgcaccattacgtttagcccgcgcacctgttgagaagcggaaccgtctacgaaatcttccgccagggcaaaaccggcattattaaccagcagtgaaatcgggcgctcgggggaggctaaacggcgcgccactttccgcaatccttgttgcatagctaaatcggcaggtaacacttcgcaggtcaccccataaaagtcttcaatgcgttgtgcctgttccagcaaaacattttctcgccgcgccaccatcactacattgtgtccgcgccccgccaactggttacaaaactctaggccgagcccactggaggctccggttactaaaacccatgacatcttttaatccccctcgattcctaaatctgtcaaatctagtgccgccagatattcccagccggcctggttaactttttctttagctacatcgccacgatcaactaccaccgctacacacagcacttttgctcctgctttttccgctgcctgcgctgcgcgaataggcgaaccgccagtggtggaagtatcttccacgatcaccacctgttttccggcgatatccgggccttcgatctggcgccccatcccgtgatctttagcttctttacgcaccacgaaggcatcaatatcaagaccccgcgaagcagcggcctgcataatcgcaaaagccactggatccgcccccatagtcagcccgccgaccgcatcgatatcttccggcaggtaaccggcctcttctagcagatccagcagcacatgcccgatcagaactgaggcttcgtgatgcagggtggagcgacgcaaatcaatatagaatgaggatttctttccgctggccagcgtaaaatccccgtatttaacagatagctctttgattaaagaaatcaggcgagccttttgagagtcgttagcggtcatgacattcagtttatcggttttataaccgctatggttgacacatgaggattgcaacttggaacgttaactctattcgggcacgatatgagcgggtgagcgcgcttttggagcgggaaaacttggatgttttggcaatacaagaaaccaaatgccgcccagatcagttcccttatgaaccgtttaagcaggccggatacgaagtcgcggtgcatggagccaaccagtggaacggggtggcgattatttctcgggtaggtctcgaggacgtgcagcaggattttcccgggcagcccgcttacgggaaccccgggaaagaaccagtagtggaaccgcgcgcaatcagcgccctatgcggcgggataagaatcttttccctctatgttcccaatgggcgcgaactatcccatccccactaccgctataagctgacctggttaaaaaacttgcgcgagtatgcgtcctcgctgctagaggcggatccaaagatacaactggcactaatgggcgactggaacattgccccctttgaccaggatgtgtgggatatggaggtgtttgcgggtgccacccacgtatctaaacccgaacgcgaagccttcttcgctttcgcggatgctggtttcactgaagtcacccgcgacctgttcgaccaatacacctattgggactataaacagttacgttttccccgcaatgaagggatgcggattgattttgcctactgctcccctgctttgaccagccggattagcgcagcccagtctttgcgggaggaacgcaaaggtaagggcgcctccgaccatgtgccggtgattcttgaggtggctccctaagcccgctgagcgtttttgcctacttcgcgcagggcgcggttaagttctggccacagctgcttatggagggcgccgaaacgctcttgccctaagaagactgctcccaggcgtatggcgggatcaatccacaagaaagatccggattgcccgaagtgtccgtaggtatccggggaagaatccggcagagtccagtgcggatctttggcggcgcggatttcgcagcctagcccccaagcattgtcgcggtgaaaaccatatcccggtaacaccccgggtagctggattccatcactgcgcgaccaggcagcaaacagttccaaggataggaaccgcgggcaggcggcctcgaaagcaaaagccaaaagttctcgcaggctgccatgcattccccaggcaggcgaacctcgcattttgcgctttattcccagatgagaaaatagcatttccgcaacccaggtagcaaaaggaaccccgctgcgctgagcgagcagctcaccgaggatttcgtatcccgaattggagtacacacggcgggtatggggcgtacgggtaaattctcttttttcatgatcgaggccgctgcggtgcgcaagcaggtcggccacgctaacggaacgaagctcggttactcctggtaactggggcaagggttgatccaagtcgaggacgccgttttcgacggctcccagaatcgtacgggaggtaaccagcttagtgactgacatccagggatagactttgtcctggtctccccaggtacctataacctggcagctttggggtaaagacacagattcataggaaaaaagcgcgcaggaaaccgggaaaggaaactgcgttaaaactgcagttactgggtcaaaatccatccccacgagtccctagaaggggcgggcagccataactgcggtaagagccgccactgcttcacgtggcacgacaccaacatccgccagagtattgtattcgtcggtttcgagaacattgttgataaccaaacggcccaacaaatcgatgctgagcgcctggttctcttgcgcgtattcgaggtcgctggccaccagaatgccagaacgaacaattttgtccaagatttcttccggcacatccgaaagaccgtacttctccatttcctgggaggaaaggctgatgtatcccttttccaacaaatcttccaaggtaaatccagccacctgttcgattgcggccattgcggagggggatgcaaaaccgctggacatgatggcgtgaagcgccttggggttggtgagatccacctggttgataatcaagttggtcaaggaaccgactacatctaccccatccctgttgtagagccactggatatgtaggccgtaccattcggccaggagggaatgtgccagtgtcttgggatcggaatccttgttgatgagatcgtcttcttgtagctgcccaaaggcgctggttagcaccttttgtaacccttcaaaacgagccgcgaagtggtcgtgtgccgggtgcacctcgttggaagcttccaccgacaacatacattccatttccacgatcgtggggttagaactgagctcggtagaaagttcagcgaaggcattaaaaacttcgaaaggctgcatgttacgcatagcctgaacatcgaagttggagcgatcctcatagcgctcgataaccgccatgagcagggcttcttttgaggggaagtggtagataacccccgggtgggatatgccaacacggcgagccacatcgcgcatagagagaccgtggtagccaacttccgcaatcatatctacagttgcgtcaagtatggcttcacgccgagccacgccaccggcgtatggtccgcgttccccgctcttatgtgctggtttgggcacctgggcatccccctcccgtttgcctatcgcctatacttttttctaccactgggcataaaaatacccgagctctatccaggatacagtttttctccccaaatcacctaacaaatcggcgatgatttataactgctccacccgtatccaagcgcaatcgacccccctatcgcctggaattttacacattcccgctcaaataccttcactagctggtcttttaatgaaaatagatatcaaaaaatggtgccggaagcttatctagcttccgacaccatttttacgactacccgtcattaaattaacaacaggtggaatcttcccgccggggcggcgtgcccctccggtaccgtcaccttgatttcggcgccgtcttcccactttccagccagaagaccttgcgccagctgatcgccaatttcggtttgaatcaggcggcgcagcgggcgcgccccgaacgccgggtcatagccgcgattagctaaccactgcttcgcgtcctcgctaactaccaacttcaggcggcgagacgctagccgctccatcacttgcgctaactgcagatccacaatctgggcaagctgagcccgactgagcggcttgaagatcaaaatctcgtcaagtcgattcaagaactccggcctaaagttggctttcactgcctctttaaccagacgttctttctcatcctcgctcatatctttctcggtcagatactgcgagcccaggttagaggtaagcaccaaaatagtgttccgaaaatctactacccgaccttgaccgtcagtcagtcgcccatcgtctaacacctgcagcagcacgtggaagatttccggatgcgccttttccacttcgtccagcagaatcacgctgtaaggacgcctacgcaccgcttcagtcagctgaccgccttcttcgtagcccacatagccgggaggggcaccaatcaggcgcgataccgagtgtttctccccgtattcgctcatatcgatgcgcaccatagcggcagggtcatcaaagaggaacgccgctaaggacttggcaagctcggttttcccaactccggtaggcccgaggaaaaggaaggaaccggtcggccggttggggtcagacacccctgcccgcgagcgccgcaccgcatccgatacggcttggactgcctgctcttggccgattagccgtttcccgatctccgcctccatatgcagcagcttgtcggtttcggtttgcagcatttttccggtaggaatacccgtccaagactccaccacttcggcaacctcggtggggccaactttttcgactaccatggcgtcggagccatcactttgctgttcctgcttttcggcggcggcgatcgcagcttgaatctggggaatttccccgttctgcagccgtcccgcagtttcccaatcgccactgcgcatcgcccgctctagctgggtgtttagcttatcgagttgggcgcgcaaatccccgaccttattgcgagaggctttttcggattcccagcgcacatttagttcatccaagacctgttgctctttggcgatctctgcgcgcaaatctgctaggcgggccttgctctgctcatctaagccttcgccctcagagtctgccaggtaggcttcttccattttcagccggtctacctgacgccgcttttcatctacctccaccgggctcgaatccagctccatccgtagacgggaagcggcctcgtcaatcaggtctatagctttatccggtaggttgcggtcggtgatataacgatccgaaagtttcgccgcggccaccagtgccccatcggtaatcgtgaccttgtggtgcgcttcgtatttgggggctatcccgcgcaaaatcgctaccgtatcctctacgctaggttctgccacaaacacctgttgaaagcggcgttctagggcgggatctttctcgatgttttgtcgatactcgtccaaggtggtagcccccaccatccgcagctcgccgcgcgccagcatgggtttaatcatgtttccggcatccatggcgccttcagatccacccccggcacctactaccgtgtgcagctcatcgataaaggtgatgacttccccgccggcgttcttgatttcctcgaggacggccttgaggcgttcttcgaactcgccacgatattttgcccccgcgaccattgcccctaaatctaggctaatcagtttcttattttgcaaggactggggaacatccccggccacaatccgctgtgccaggccctctacgactgcggttttacctaccccggcctctccgattagcaccgggttgttcttggtgcgccgcgagagtacctggataacccgccggatttctttgtcccgtccgattaccggatctaatttcccgctacgtgccacctcagtgaggtcgcgtccgtattttttcaaggcttggaaagaggattccgggtcttgagaagtgaccgggtctttacgaatttcctttagcttggctcgcaagctatctacgctggcacccgcgccctttaacagctgagtaactgccgtctgaccttcggagtcatcggcgagagcgattagcagatgctcggtggatacgtattcgtcgccgagttcccgcgccagatcgccggccttatttataacccggcgcatcgccattgaggtttgcacctcgcctacgctgctaccggtgacgctgggaagtcttcccatcaggtggtgcagcggcgcgttaatttgctgggtgcgattaggcaccaccgcttctagaagcgcaaacgcgatcgagtcggtttgccctagcaaagcatttaaaagatgttccggctctacctgggggttgttattggcttgcgcggtttgtaccgcatcccctaaggcggcctgtgattttactgtaagttttgtttccatttttcctcccgtattcccatccgggtgggatggggtgttgctatttagtccaacacctctaaagttgagtttattccactcaactttattttttgggttaactacctcacaaaaaccatccctagcccaagaaagctagcacacccggaggacgtgcgaaaacgagttgctaaaaagtctctgattgcgccccaaacccaggacactccggaaaactagcgatagtaggagttagtcatgagagcttgtcgattgtcccgaccgcgttttaccgtccagattattccccaaatcagcaagccgatacctacaaatcccataatcgtggggaggataaatgcccagaccaacagggtaaaggtaacattgggaatcacgctgatggcggtgataggggctttatcgggctgggcgctcttgcaatcaatcaccagcttcccgcgagagtgcagattgtaactgaacacctcgttgttcttttcactgccggcagtgtcggcgctgaaatctgcccccgcatcggtttcggaaataagttcctgaccgttgaaggtagttttacaagtaacctcagtatcttctggcacctctaccagcactatggtgcgcccgtgataatcatcttcacgggtgatgacgctatcgccactgtgcctttccataccggcgctgatattaactccatacccgactagcattccgatgcaggttatcggggcgaggacgatcatcaagatgatccccagcaccaacgtagcaatgggcactgcttgggattttctttccggacgcggagttaccgggtcattgctaaggccggaaaaactgcccggtcccatatctcccggtccgcctgattggggcattcccgagggcgcgttccaattcgtgctcccctcatatccaggcggggtgggaaaattatttcctgctggggaaggactttgcggttgcgggtaagagttggcacctgtataaccacctgcggcttgcccataagaaggctgagaggcgggaggctgcggaaagttattaccgccattattttgggcaccaaagtcatggtgaacgttaggttcaattccagaaccaaaactattttgctcaccaaggttattttgcggaggatttccaggaaaagccgcaaaattattgccgctatcccggttaaggggttcttgctccgccgcctgctccggggaggaaaccggctgctgagatgaggacggcgaggcagcttggcgctgttcggcaggacttccagagtaaagtttcccgtctagcacccattgttcttgctcgctcgagttagcgccgtacctatttggagtttcgttcatcgtttctcccttgcctagtttcctcaattgtaagggctagcatcgattttcaccccaaataactatttgtcctggtagatagggcacaagctcctgtccagacacccgccgcgatcctgggaacttagtcaagggagaaacttccccagtaggagcagcggaaaataccctgccacgtcctcgttcataaatagcgatccgctgacgcaaacgctcattttcagccgccaagcgggcagcagcacgttgcaactctagcacccgcttaatgcctgccaggttaataccctcttcttgggaaagacgctgcacttctcgcagttccgcaatatcttcggcgctataacgccgccctcgccccttagtgcgcttagggataactagtccgatgcgatcgtattgccgcagagtttgcggatgcatccccgctagctctgcggccaccgaaatcacatagagcgtttcaaccgtggcagtcattattgcctctcaagctgactgcgggggttaaaatccgggtgatcggcgcgaatcgcttcgcctagctgctgggcaatatccactacccgactagaaggtttgcgcggattcactatccgtaccgtggccaccacgtctaatccctctagacctttgccgcgcaagcgcagcttggtaccactgtcggctccggcaggtatcttgatagttgcctgtttaccgccaagcaggggcactttaactttggcgcccgcaagtgcttcggcagcggtcactggcagctgcatttgtagggctttaccgtcaaaggaatacaacggatcgggagtaacgtgaactgtcactaccaggtcaccgtttcctcgcggccccggccgccctttaccgcgcagccgcagttttttaccatcgcggatcttactaggaatccgcacggtcatactcttgccatctaccgtcagcttcatagtgctgcccgccatagcagtccgaaaatccaaggtaacttcggcagctaaatctttacctttgccaccattggaaaaaccgtcagaagtcgcgccgaaagccccggatgccccgaagctgccgcgaccgcctccggaaaacagcgaaccaagcatggagccaaggtcgccgtcacccaagttgatcctagcggagccgcctccgggagcggttccgcccccaaacatagaggcgaatacgtcgtcgaagcctccggccccaccatgacctccggtggggcctgcgttgaaacgcgcaccaccgcctgccatagcgcgaatagcgtcgtattgacgtttttgttccggatcagacagtacctgataggcctctccgattgccttaaacttgtcttcggcagcctggtcaccagggttttgatccgggtgatatttgcgtgccaattttcggtaagccttctttatttcggcctgatctgcctttttcgatattcccagggtgcgataaaaatcttttgctacccaatcttgtccggccatgaatgctcacctccttaatccctaatccgggttatttactattacttttgttgcccgcagtacctgatcgcccactttgtatccgggctggagcacctgggcgatgctgggttcccccgccccgccactttgcgccatcatggcttcgtgtacgttggggtcaaactcatccccgttattgccatagcgcgttaaaccaaagttggtttctagggtgttctccaatttgttagcgatcgattcgaaggggccttgcaattcgccggcctctcgcgccgcctgcacgtcatccagcacacttagcagcacctgcaacaccgctttttgcccatctgttcggtgggcagacatctcagttttgctgcgcttgacatagccggagtattcctgctgcaagttataggtttcggctcttgcccgggctagctgttcttctaactcagctacctgggctttaagctgttctacctgagcatttgcgtcctcaggctcggcttcttcagccgcgctgccttctgctggcacggcttcgggatcgctatcgatttcttcgcccagacgcgcagctaaatctgcaaaagccgcgttttcatcctgcttatcggcttcttccggtttagcgctggcaaccggctctgactgcacagaggcgtccgagctgaccggtgctgactgttccggaataccggtattttgaagatccgaagcctgcgaggcggaagcatccgcctgattttctaattctggatccgaagtgggatgcattgggtctttcaccttgatctttatcctccgtttcccattttgctcttccaaaattcttcctcctgccggtggggcgcccactttcgcgagcgccccagacagcttgagactaaagagttacttgtcttcgtcctcgtcatcgaccacttccgcgtcgattacgtcatcctcggctccggcaccagcatcctcagcggaggcgccagactctgcctggctttgcgccgcctcggcctgagtttgcgcatagagggtttccccaatcttctgcgacttggtattgagttcttccatcgcagtcttcacggcctcgatgtcttcaccttccaaagccttcttgaccttgtcggaggcttcacgtacctctttggcgatttcctcgggcagtttctcggcgttatctttcagcagcttctcgatcgagtaaaccgtctgttccgccgagttacgcaaatcggcttcttcgcgccgcttctgatcctcttccgcgtgcgcttcggcctctttaaccatgcggtcgatctcgtccttagaaagcgcggaacctccagaaatagtcatcgactgttccttattggtgttctggtctttcgccgagacgtgcacaatcccgttggtgtcaatatcgaaagtgacctcgatccggggaacccccataggcgcgggcaaaatcccggtgagctggaaagttcccagcgacttgttatcgcgggtaaaggtacgttcaccctggaatacctggattagcaccgaatcctgattatcttccgcagtagagaaaatctccgaatgcttagtaggaatcgcgctattgcgcttaatcaaggtggtcattaccccgcccttggtttcaattcccagcgacaggggggtgacgtcaatcaggaggacgtcgctgcggtctccctggataatcccggtttgcagggcggcaccgctggccaccacttcgtcggggttaaccgacttattggcttcttttccgtcggtcagggactttaccatatcggctactgccggcatccgggtagaaccacccaccagcactacgtggtcaatatcggatacgtgaatcttggcgtctgcaattacctgttcgaagggcttgcgggtgcgttctaggagatcctgggtcatttcctcgaaacgggcgcgagttagacgctcatcaaggtgaaccgggccagactcggccattgacagatactgcaaagaaatctgagtggaggtagccgaagacagttccttcttggcctgctccgcagcatcgcgtagacgctgaattgcgatcttgtcgttcgacaaatccacaccggtattggtcttaactgtgccaatcaaccaatccacgattcgctgatcccaatcgtcaccaccgaggcggttatccccgttagtggcgcgcacctcgatagtggaaaagccgtcctcatccttcattacttccagcaaggaaacgtcgaaagtaccgccaccgaggtcgaagaccaaaatggattcgtccttttcgctcttttccaagccgtaagccaaggcggcggcagtcggctcgtttaccagacgcagtacgtttagtcccgcgattttaccggcatctttggtggcctggcgctgcgcatcgttgaagtaggcaggcacggtgattaccgcgtcctgtaccgagtcccccaagtattcttcggcgtctttcttcagtttgcccaaaataaaggcgctgatctgctgagggttgtattccttatcatcaatttttactttccaggagctatctcccatgtggcgcttcaccgaggcgatggtgcgatccacgttagtcaccgcctgccgtttggccacctctcctaccaggacttccccggccttggagaatgccaccaccgagggggtggtgcgctgaccttcagcattagcgataatagtgggctgccccccttctagaaccgcaatcgcggagttggtggtgcccaagtcaatacctactgcacgtgccatagtttcttccttcctacaaatttatttagtctttttagctctaggttctggcggctgacgcccgacagtttcagtcttcgcaacttccgccgagattccataaaccttgagccttacgcactcaaggttatcaaatcctgaggaactatcaagccaaatccctaaaacctgagtctacttaactcaactccgtaaacccgacttttattcccccgcctccgaaattttttccaaaaatttagaaaatctcctttacctgcacttttagtttcggaggggatggatggggcgcaagttttcccgaagaaaccccagctgtggggattacactttccaaattgcgctttcagcgtatatgtttcttaagtaggatttttccgaagataaaggagcaatcatggcagtcgaactggtcgaagagttcagcgaggaacttgtagaggcattttcgcgccttatcccccagctttcacaatccgctaaacagctaagtgccgaacagatcaaagacttctgcgaacaagatggagtttacctgctagttttccgctccgaagaaggcaagattttagggatgctctctttggcaaccttcaagattcccaccggaaaacgcgcctggattgaggacgtggtcgtggattcggctgcccgcggtcacggagccggccaaaaactagttgaggctgcagtagttcacgccaagaaggtcggggcaaaaaccgtggatcttacttcccgcccctcgcgcgaagccgccaaccgcctctatcggcgctgcggtttcaagcagcgggaaaccaacgtttatcgctacgctgataactagccccatctgactacccctgctgcggtctgatacttaaagtttttgaggacgcaggcgaacttaccccagtctgcaagataaaacacatcgccgatttattaggatatttgtgcaggtaagagtattttattttatgtttcttcccggacgcgtgggcacctaaggcgtgacttagctagcattgttccccaaagtcagtattcctcgggtaacaatggtggcaacagcagtcgagaaataaggaatgatttatgaccgccctgtctattcccgctttggaactttctaccggataccagataccgcagttcggtttgggaacctacaaactccccgctgaggattgtgtagatgcagttaaatatgcgctggatctggggattcgccatattgataccgcgcagatgtatcacaatgaggcggaagtagggcgcgcgattgaagaatccggaattgaccgcgaagatattttcttgaccaccaagctcaataatgacaagcatttaccggaggacgctcgtaaatctttccaacaaagcctcgaggatctgcgcaccgactacgtagatttattcttgattcactggccactgccaacccgctataacggcgatttcgtgcagacctggcgcaccctcctagagttccaatatgacgaaaaggcacgcaccgtaggggtttctaacttccagatacaccatttagagcgcttgatcgcggaaaccggggtgaccccggcggtcaatcaagtggagattcacccccactttgccaataatgaactgcgcgccttccaccagcaacatggaatcgtaaccgaagcctggtcaccgctggcacgcgggaacgttttaggggaagaaaaagtaattgccgccgccaatcgtttaggaaaaactcctgcccaggtagtgctgcgttggggcattgagcgcggagacgtcctcttccccaagtcggttcaccccaaccgcattaaagaaaacctggatattttcgatttccagctcgatgaacaggccaaagcggatttagattccctggataagggcgaggccggccgatccggctcccaccccgacaccatggacatcctctaaacccctataccgcgactagcgacacaagggctgatcttcacggttggcgcgggggctagattttccctcccgcttgaaaacaggtaacgccgttccctggaataggttggtgcggtaaaagcgctcgggggaccccggtgagccttgcttcgctcggctcaagccccctctcgcatcttttaccacaccaatagctagtgcccgcctgcgcagcaataggcgcacttaatatcaagacatagagggctgtttagtctcagctatgcgcgggggctagattttatccgagtgggtgcggtgggcataagaattcggggaaagacttcagtctttccccgaattcttgggcgggaggaaaaatctagcccccgcgtaacctacttgcgttgatacaggctagttttcacgattggcgtggtagtagtcgattaacgctttagtagaaggatcttgctgctccaagacctcctggtcaccggcgattgccggagtgagcgccttggcgagctgtttgcccagctccacgccccactggtcgaagctgttaatcccccacacgaccccttgggtaaaggtgatgtgttcatagagggcgattagctgccccagaaccgagggggttagccgcggcgccatgattgaggtcgagggcttgttgccagcgaagacccgggccggcacgatttgttccggggtgccttctgcacgtacctgatcagcggtcttaccgaaggctagtgcctgagtttgagcgaagaaattccctaggaagagttcgtgctgatcgttatcgccatctttgagcggccaggtgggattggcgaaagcaatgaagtcggcgggaatcatttgagtcccttggtgaatcagctggtagaaggcgtgctgcccgttggttccgggctctccccagaagatttctccggtatcgtaggataccgctgccccatcccagcgcactgacttaccgttggattccatagttagttgctgcaggtaggccgggaaacgatgcaggtattgggaatagggtaagacggcgtgggtaggcgcgtgcatgaagttgcggtaccacacgttgaatagtcccatcaataccggaacgttttcggtcaaaggtgcagtccggaaatgttcgtccatggcgtgcattcccgccaggaaatcagcaaagccctctttcccgatcgcgactgccagggcggtacctactgcggaatctaccgagtagcgccctcctacccaactccaaaaaccgaaggcgttatccggatcgatcccgaactccgcaaccgcctcaaggttggtagaaaccgctacgaaatgcttcgatactgcctggcgcgcgtcctgttcactgagctgttcagttttttcttttccttcccagattccgcgagccgctaactgttctagcagccaggtgcgagccgcccgggcattagttagggtttccaaagtagtgaaagttttggaggccactataaacagggtggtttccggatccaaatccttcactttttcacacagatccgtgggatcgatattggatacgaaacggcatttaagctccggtttcgcatagggaagtagcgcctcgtaggccattgccggtcccaggtctgagcctccaattccgatgttcaccacggtggtgatgggtttgccagtaattcccagccaggaaccactgcgcaccttctcggcaaaggcatagacctgctccagaacggcggcgacatcagcgctcacatcctgtccatcaacttttagattatcttcgcgaggacgccgcagggcagtatgcagcaccgcgcgatcctcggtggtattaatgtgatcacctgcgaacatggcgtcccgatgttcctcgactttggtctgtgccgccaggcgtgccagcgccgccaataccggggcagttaccagattctttgacaggtccacttgcaaatctgcggccttaaaagtcaaatcttccgcacggctaggttgggattggaaccaacccgctaaatctggctggaacgactgggcaagattctctagctcttgccacgcctgggtagtagtgggatcaattggggcactcatgttttctcctatttgaatctgttggttttaaaggtcagtgattggcaactctgggacttcaatgtcccattcgtcacgggaaaccaccggaataatatcaataagcggcaaccaccattggttgagaggccgccgtacctgggggtctaccttttcttgcatttttagtagcgggaaggtttcaatcccgtgctccgccaaccccacccctaagggttcagttctgttttgcgcgaattcctctcggagttctttgatcgctacccgcactaggcgcgtagctaagatccggtcaaagggcgaaggctcgccgccttgctgcaggtgtccgagtgcggagtggcgcacatcgaagagaccctgcgattcttgggcaaaaaccgaggcaatgaattcccggtcgtatctgcctccggcctcttcattatgcaaaaccaggcagaggcggcgaccatcacggaaagaatcccgcatcattttcacgtcatccgctagaatttgtagatcgtaggggaattcatccaggtagaccaactcggctccggccgcaatccctgacattagggacaggtatccacagtgtcgccccatggcatcggctacgaagcaacgccgcgaggcagccgcagattcccggatgcgatctagcgcccagactgcattatttaaggcggaatcggccccgatagaaagttcggatcccggcaaattgttatcaatagatgccggaacgcaaatcatcgggatattaaaagccggatagcgggaagtttcctggcgcatctgattaatcgacaggtaggcgttatagcctccgattaccactagcgcgtcaatacgatgttcttccagggcgcgccctatcgcatagtattcttccacccggggaattggacgcagggttcccagttcggcaccgccatcaaagccccatccttcaacgtcttcccaggccagatgcttaacgttcccggacattagtccgtcaaaggagccgtagattcctagcatttcgaatccgcaatcgatgccttggcgaactgccgctcgggcggcagtgttcatcccgggcgccaatccccccacgtgcatgatggctacccgccgcgcatcggcaggcagctggtcttcctggggaggggtcgacattacttcgttaatggccagcatctcgcggaaggaacggccgcgcgcctgcaccgctttttcatattctttggccttggtgaatttggcgactgcacgcgtgtcgccaaccgctttcatcaggggcaggcgagctactcgattgttacgcgccccaataatcaccggctcggagttttgatcttgatgcagcacttcataggcggcggcatatcccagagcggtgggcatccagcggtcataggcagagggagtgccgccccgctgcacgtgtcccaatatagttaggtgcgggcgctgaccggtttcttgctcgagggcgtcacatacatcgtttgcagtgatgggattaccctggtggtcgatagctccttcggccaccagcacaattgattcgcgtctgccagctttgcgcccggctgtaagtttgtctgctaaagtcttctgccaccctgcctcgggaggagcttcggggataaaaacatagtcacagccacgtgcaaccgcactcattaacggaagatacccgcaatgccgccccattacttccactacgaaagtccggcggtgggaggcggcggtagaagatagttcgtccagggctaccaggattcgctgtaaggcggagtcggtgccgatggtcatatcaaatccgactaaatcattgtcgatagaaccaaccagaccggctacccgtaacttttcgtgtccggctacctgctcaggggttagttccccggactgcaccaattcttccagcaggctcggccattcttcttggaactcattagttccggccagcgacccgtccccaccgatggaaatcagccggtcgatcccctttagaaccagattctttgcggctttgcgcaatccggagcgttcccgaaactcctggcagcgggctgttccaataatggtgccgcccttatttagcacactagacacatctgaccagcccagcggcttaatcatctcgccgccggtaactgccccttgccatccctcaagaatcgcatacggctgggctcccatttttagggcggtgcgcaccaccgccctcacggccgcattcatgccttgggcatctccgcccgaggttaaaactccaagccgttttggttgcccttgcgcggactggcccattattcctcctctttgaaggctggcccctaggcgcttcccctggccaccagcgtcatcattttatctacttctgctggatccggcgcttccaccttttctccagacaagaatttgccgagagcctgggcgtacatccgcccactaacctcgggattaaaatcaacagacgtcaaggggggattgaaaagttccccttcgggagcgttcccgactccaatcaccgcgcaatcgttaggcaccattcgcccacacatccgcagcgcctggattacttccatcgccaagaaatcgttatgacaaataaatccgtctaccccgggattcttcgaaaatagctgcaccaactctccagataggttgggagagttatattcggtggtcagcatagtgggggtaggacatcccccgaaaatgcatccctgcagcactccggcgtaacgcaattgatttagatttttaagcaggacgctatcggaacagagataaaccaagttacgatgcccggaagaaaccatccgcgaagccatggctcgccctgaagcaccgtagagtgccgctgccaccgaatacagcggggaatcggtggcaaaaatggctggctcaacctctactcccaggctttgcaactgtttattttgctctgcagtaaaaggaaccaggggcaaaatcgggccgataagttttgcactgtcagctagggtatcaacatcgagttgatcgctgtctaactgcaccgggatcaagtcaatccccagtttggcggcttcgaacgctactcgcataaccgtggtcagcaggggcgcgttatgcggcatcgggggaattacgaacaggcagcgttccacatctacctgttgtttcttcgccacggtttccctccccgccctaatcgttacctgctctaggttttgaatgctcagttctaacgttaatactagcctatttcaatgatccaaccagcgtgaaaacggagcggacgcttcatttttgcgtccgccccgaaagaatccttcacctgggggctataccagaggaaatccctctttaaacccccaggtcaaccgggttttattttatgcttcttgctttaggcgctgagccaggttttcaatcagcacattcataaagccatcggtgtctagccagggatgatccggggagatcaggcgcgctaggtctccggtcatttgcccgccctcgacagtagaaataattacctcttctagggtctcggcgaagtgggtaacctccggggtattgtccaggttgccgcgatgcgccagaccacgggtccaggcgtagatagaagcaatcgggttggtggaggtcttttccccacgctgccagcggcgatagtgccgggttaccgtaccatgcgcggcctcggcctcaatcgtgcgcccatcgggggtcattagcaccgaggtcatcaaccccagggagccaaagccttgggctacagtatcggactggacgtcgccgtcatagttcttgcacgcccacacatatccgcctttccaccgcagggaggaggccaccatgtcatcaatcaaacggtgttcatagtggagaccggcttcctcatattgcgccttaaattcggcgtcatagatatcggcgaagatatctttgaactgcccgtcataggccttcaaaatggtgttcttggtggacaggtagaccgggtagccgcgcaacaggccgtagcggaagcaggcacgggcaaagtctttgatggaatcgttgaagttgtacattcccatggcgactcccccgtcttcggggtattccaccacggtatgttcgatgggcttcgagccatctttaggatggaaagtaatagttaggctgcccgcaccggggatcttgaaatcagtagccttgtattggtcaccgaaggcatgccgggcaactacgatgggtttcgtccatccgcccaccaggcgcggcacattgttcataatgattggttcccggaaaatcaccccaccgagaatattccggatagtaccattgggcgatttccacattttccgcaacccgaactcttccacccgggcttcatcgggggtaatagttgcgcatttaacccctaccccgtgttccttaatcgcgtttgcagcgtcaatcgtgacttggtcactggtggcgtcgcggttctcgatgctgaggtcgtagtaacgaagatccacgtccaggtaaggaagaatcagttcattacggattttttgccaaatgatgcgggtcatttcatcgccgtctagttcgacgactgggccggctactttgatctttgccatgaataactccaaaagctgtagttttaagtcctcggtatcaactttactcgacatcgagataaattgacaatgcctaaagctgtgagttaccaagcgaaattttgagattttttgcccccgtcattaaacccgctttgcctaccaggaagtactcagtcgctcgcgcatgaagatcgggtagcttaaattagctatatgcaggtgcagattggcaaaacttcggcggcgcggccggcgccgcttatttggttagagtcaggtctgggtggatctatgcgcagctggaacctgacattcccaatcctttgtcgcgctttttactgcgcccgctctacccgctccccaattttgcgcccccacgaggacgaggaggtaacttggcaaagcctagtggcggaaatgcgagcgggcggagaaaaaaccgccgctcacctgggagctacctttgataatcccctacccatagtgttggtgggacactcctatggggcgatgctagtgcgagtttgggcggcgcagctattaaagtcccccactccctcccgggtacggccggtgggaatcgtgcagatagatccctcttttgagggaaattacgagggcgcgagccccctctatcaagaaatagagcgaaagatcctcgcttggctttaccggggtgccgcccgcgagcaaccctccttttatatggcctggcaagacctacaggagattgacctgctggatcgccagctcccccagctggtgatttccgcagctcaccgccgcaatagtaaaacctggcaggggctaacctcgtttgcccgcgcgattgatgcccggctggtgcgcgccgactcttcccgccaccttttgcaggtgttcgatccggcaaccgtcgcgagtcagattattaggtttactgcgcgcgccagcgagcggccaaaacgccaagggaactaaaatctacagaatcacctcaatacagacaaattattctcacccacaccccgaatgaggcaacactcaccatttgcccgcaatcgctgtgagttcggcctgagcacttgctttgggcagctaacttatattaaattaacaatgttttaatggttgaaataattaataggtagaagcaccaatatttgccctcaaaaataaattttggtgtcggaggtgggaagtcccccatgaaagtttcgttcaagcaaaccctggctctactgctagcactggcattgatacttccggcggcagtgatactttcccgaccgctgacagctgacgctgcggaaaccagcaaataccaaaattccatggaactggaaccagtgaagcttcctgctgacacaacgacggcagatttcgtcaagaacccggatcaaccccatatctataccctccgtagcgactttaaggttgaaagagataaaaaggaggacggcactacaaattacgccattaactaccagccctatgtggcgaccgtgggggaagatgctactaaagacgaaaaagacaaggtaaaaaagactattaagctgccggatttcctgggttacgataagcccaaggataatttcgttatcgactacaacacggtggttaacgaaggtaaccccgttagcccgcccagtggcgataatgtatgcggaaaggccgatcagaaaactcgatcctttgactacaaagctattgaaaatgaagttacgatcaagcatgttttccaagacctcaatgattttgacaaatatggcccaaaacccggggaaacaaaaataattgaaaccacccagaaaggtgccatcggttccgatttaaaagttaagcctttaaaggatgatgaaatagcgggttttattccagaagctgattctattacggtgcaggttccccaagacactaagaatttttccgtggaataccgttacaaccgtaaccactatgacgtcactttcgacaccgatgggggtacggaagttccttcccgcaccctgtactacgggcaggtcatccccaacctcgagcaaaaagatatccccactaaagtgggagccaccttccaaggctggaaaccttcggtggacctaaaagataactctggcaagacgacgtttaaggccggcgaagttattaaagacagcagcggtaatgcgattaaagatctaaacgccaagctgattatgcccgccgaaaacgtcaaattcaccgcagtgtggaaagataacccagaggcagactatgcaatccaattttggacggaaaaggccgactaccccgagggggcttctcttttagaaaggtacgatttcgtgggtacccatgtatataagaatcaggccaccggtactcgtccagaccttgaaaaagagacggtaaaaggggtggagtttccagatctagatcaggcacggttagataaaatatggaacaaacaaagatttaaccggggtaaggacctcttcctgaataaattctataaatacaataaagatttaactgataaagaaaacgctgatccaaatagccccaacttagtaaagacggtttcttccaccggcaaaaccgtctataacatctattatgaccgccaggtgtatgacctttactttacgaagtcgaatgctaagacgggtgatcaagctgaggcgaccttctatccagaaatttggagacacggtaaaaagttaggcgagccgggaaacccctaccactttaaggcccggtttaaccagttgatgacagagtggccagatgacgcccaagaaaccaaggggttttccgagggtaagcaaagttttggctggagtccaaacttcaataatccacaatggatttaccgtgacacccctccctaccggctctcggctgaagagtttctagatatggacggctacgacatacggggtggttacaccaagaggattgatgccggaaatggcgtcattaaggacctcaaatggtttgagttcactactctttcttttggtatcgaacaaaggggtggccccaaagaaaccacccagccaatgcctcaccacatggacttttggatggatgggtttgaacccggagagaccatcattgactacaatctttaccgaaccaaagcggataccgcagcaaaaacctatggtcacaagtatccaaaggtgcagggctttaccccttacggtacagccgaagtctcggagcagcttgacgtggatgagctcgctgaggtgaacgaggagcggaaagagacaactccccttcctgacgaacaggtaatagacccctatggcaacgacaaaaccaagggcgacatgcagtttatgaaaacgttctttaaccgtgctgatgaatttggggacgttgccgatgacagcgagccatttgataaaaatggctatattcgttttaagtaccaccggaacaagtacaagttgcggttcaacaatgatcccgcaaaccccaaggacgacagtgagtacaaccagaccaatcagacagaggtcttctaccaaaagcccttaaaggatttaaacctagatgacccgcagaccttaattgatctagagctgacggatctggtggaaaaagatgacaatggaaaggacaggattaaaagaccagagggcctggcaccccaaatggtattcaagggttgggcgctagacccggcggggcagaaactggtttgggaaaacaaggaaactatgcccgcgcacaacctggttctctacgctaagtggggggaaccagactataagtggaaggtaacctttgaccccaatgggggcaagctagatcccattgaggagaagaatgttaccaccggccctaagaccattagggatggcgatatcgccgaccaaaaagaagtcacctacccgataaagggtaaaaacgaaggggacaagcaagtctttactgttgtgcagcggcaaaaactggtagaaccgaaaaaacgaacccgggagggctatagcttcatgggttgggaggtgctgcgctataagaaggatgccagtggtaactacaccgaggaagtggacgattcttatcgaaaaacctataaagttccggaactttactcctacggtaacgacgtagtaagtcccatttacctgaaagccatttgggtaaaaaatgatatgcaggatgtcaaggttttccaccacttcttggataacaatctcgcaattgataagaccgtgaaggataatccggttatagaaactaaaaggaaccagcgcgccgataaatacgtggccgccattggttctaggcaagatgccaattggattttggcttccgatgcagatttgcagaataccaaggacgaagaaactaaaaaactctatgacgattatcaaaaactggctgacgagcttggtaaccgggcaacgaaaggtaacacctatttccagacgcttaggatagaaccgaaacagattttagaagacgggaagttagttgataatccgaaatccaaggacaatgagttccacttcttctatcgtcctttccggacccgtaatttcaaggttaactatgtggaccaaagagctcaggcggagttagcgaaagccactaccgatgcggaaaagaaaaagattatagagaaataccgcatcctggatcagaaaccagtcaccagtcaggcgcggcattacgatgcttgcaactacaagccgataaccggctggcggctgacttctaaaccccagcagcagctcttctacgatgtagatgaagataccaatgaattcaaaggaatcaatggtactggttccgatgagattaccttctactatcaggatgtcagggtcatagaggtgccctcaggtagtcctactcctccagagaagtccgggtacgtccgggtgacctttaaggccagtaagggcggctcctttggcaaagataaagatgggaaacccatcacagaaataaattacgacgtattgaaggggctcaagtctgatctgcttccagttccccaggaattggaaaatggaaagcagccggatgaaaacaagtactatgtcactccggaagagggcaagagctttattaagtgggataaggaatcacttttaccgtcgggcacggagataaacgaaaaccataccttcaccgcacagttcgattggtcagatctgatgactaaaggggtggcgactaccgagtcctttaagactcctgatggcacctggataaataatttcgtgcccactctggatgagctgaaagcagctattcaactgcagagtaaagacaaaactaagataaccaagctgcctgagggcgcgacggtaaagttcgtagatgatcaaggtaacgaagtaaatacccaggatgatctctacaatctggtaaaagaagaaccggattcaaacgaacttgttcgtaccgtgaaactcaaagcgaaagtgcaatttgccaaagaatcagaaccgcgggagattgacgttccgataagggtttataagaaccggtacgatgcgccgcctacggctacgggaaccatgccggacttcttgatgcaggcaaccggtcctcatggcgatttggctaaactcttggatggaaaaacctatgtaaaggtgacggtgaagccctccagtcgcctgggtaatctgcctcctaagagctattgggttaaccccaaggcttgggtagagattcccgaaattgcagtcagcgataaagataaggccgcaagcgggtttaaacattggtcagctaataaagctgcccaaaatgaggggcaagctaaactgggagtttatgacttcatgaaacggcataagttcagtgaggacacggtgatcaccccggtatttgtagaaaaagtggtgacccccgtaccggaaaagaagcctaataaaccgatagtgtcacccggtccggtaaccggagctaatgcgctggtttatctctatgcggcagccttgtttactgcagctggcatcgcgctggtgatcagcaggaccaggaggaaagcacagcgggcataacccgcaatcatccctgagggtaaaactaagtaagggtggggacgcgaattcgctcgcgtccccacccttaaaaaattatttactgctcccgggtctactgccccttgggccgtaatcccctactagccggcgtcattgagaatctcgccgctaccctctatctggcgagtaccgcgctgcaccgcaatcttgcggggcttagcttcttctgccaccgggataaccagcttgaggactccgtcgacatattccgcctctacctggtcaagagccaccccattacctaaggtaagttggcgggcaaaagtgccgaagggacgctcgtgggtcagccactgaccaccagcgatttcgggggatttgcgctcggcgcgaatagtgagggtgcgatcctcgatatcgatatctacactggccggatccacccccggcagatcaaagagggcgatgaacttttccccatcgcgatacaaatccaggggcatcgctgcccgggagggaccttgacgcatggcgtcatcaaaaattgcttccatctgacggaagggatcatacctgcgaaccatgattactccttacccccgcaaagctgcgggaaatcttcttgccgagagtttctcggcctcacgtctcctattttggcactcgaagcaccttagtgctagtgaattattctggaggcgaaaacttaagcgccctaggctcaactttacttttttctttgctcccgcaccctcctaaaacaaaaaaagtccttttaacaggcaatattgttcctctttggggattaccagtaatctcagaccgaaacgccgccccaaagacgcccgaaaagcgtttgctactgagaaaatgaagacatgagcacgcgatacctacctttgttcgtctacggcaccttgaaactcggttcgcgcggctttggctccagtctgaaagccgcagtgaccgaattcgccccggcctatctgcgggaagcctccctatatatcggagcctcctatccgatggcaatccgctctatcggcggcaccgggatcgtgggacaggtattgctagtcgaacagcgtctttttgaagaaaccctggaagaactggacgaatacgaaggctacctaggtgagggcgaccccaacaatatgtacacccgccaaaccgtgcgggtagaagtattccccgatgaggacagcacctgggaaggccccacgcaagacgtaaaagcctacatctatatggctacccccgattccttccgcgatcaccgcggggagctggtactctcccccagcggtgactgggaaaaccacgaggaagagtgggaggagctgtcccccgccctcgaggacacgcaagaccccaacgttgatgaacgtttcgccgacgacgaggacgagctagaccgctaaagcctacttctttccttcagcgcccgccgccaaggattgctgatacttcatcatcaccttttgctgggactcttgccccgctaggaaccagcgtccatcgatttcctgccaccccattatttgcaggggcgtaccttttttatccttaatcagaatcgcttttacacccccggcatctgccgctttttcgggcgcaaacaccatatcttttagcttaatagccggattgtccggaacctgcgcaaacgcttctttagcggcagcggtacacttctccacgctatcgcggttttcttcggattttttacttaaagctgccactagttccccacgcgcagtcggggagctaagcacacataaagtttcggcgtccttatccagtagcgccccgtaataagcccgcgcaccctccttgggggaagcggcaccttcaggattaaagatcttttgtaaaatcccactggcatatagtcctactaccaccagggcgatgacggctactacccccaaaatccaggcgacaacccggcgggtagttgaatgatcgggacgcacactctcgattttctttaccgaaatctgggaaacatcaaatgcgctccccgctggcagggtcggtacttcctcccggtcaacgtgtccgccaacttgattaccccaaacccgttcgtcgtctttattctcccctgcctcatctggctgctccggcgattctgaccggctaccggctaaaggtaagatttcgggaacctggaactgcttatcgtcgctattgtcctcgccgctgcgcaagactgtgtcctctggatctgcgctatctgcggcgtctgcgctatcttcagcagctccggcatcatcgccgtcttcggcggcttttacgtcatcagaatcttcggagtcatcggaatcattatcggcttccctcaggtggtcagggtgctcggattccgtatccggatcctcgcccttcagagtgggggcggaaacctgtttctcgtcctcctcgcgggtttgtggcgagggattttcctccccgttcgccgccggcgaaagcttttcctggttcccggaactcttatcggcatcgtttacgccatgcccagccgtttcttctttatcttgttcattactcatagggcgatactaccgggaatacccggttatatgctcattcatctggtttcagcggtcgcgagctggcaaaatcttcgataccctggaaacaggtcgctgaaaatcagcattataaaatagctggttaacggcctttgaaagtataaattacccaacaaagtagggataggaataatggcaaatagcaaacaagaaaaaaagactccgactgtagtacccaccgcggaagaagccaaggaactcatccctgcaaataatgttgccgaggatcaaggtcagggtctaaccaccgttgccgaccaggtagtggccaaagttgccggtctcgccattaaagagattccgggagtctacgatcttggtaactctgccgcccgcgccctgggggctttgcgctccaaggtgggagcctcagaaagcatcacccagggcatctctgtagaaatcggacagacccaaaccgcgctggacgtagtgctaatcgtggaatacccctacccggtacacgaagtagccgacaaagtccgcgaagcgattttctcgtctgttgaagggttagtaggcctggaagtaaccgaagtaaacatcaaggttaccgatgtgcatgtacccgacagtgacgaagaaaaagaagaagagaaggaaagcaaggatctgaagtagccttcgccggaaaggaaaataaaatgaccaccatagccggtattttttgcggtgcttttctggcctatatggccgtagctcacggattcttcggatttttagttgccatcctgtttatggccatcggagccgtgttaggcagggcggcttctgggaagctagatctgaaaggcgttggtgaagccctgatcggcaagcacaccaccacctccgattagaaaggaggcggctaatgcaatccgataaggaacaggcggagcttacgggaatcaccacggtttccgcgcgggcaatccaaaccattgtggccgccaccactgggcgccgcatcagcgtacccgataagctgataaaagttactacccatgatgaccagggactattggggatagatatttcttgtcccctggactatgacgctctggacaccattgggcagaccccggacgcttcggtgttttcactggcaggcgaggcacgccaagacattgttaaccgcgttagcgaaatcgccggggtaaaagtagggcgcgtaaacctgcggctaaccggactttataaacatcaggaacggaggcagctgcaatgagtacgcaatccagcaaatccggtccttatgtgtcttatctagtccggcgggaaactcattcctcccgggcgctaatcagcgttatcgtggcgctactcttgatggcggggctagggtatttagctaccgagggagtgctggccgcgctaggccgccctcccctattggcgaccccccaagatttgtgggagcaagcccctgccgctttgcaggaaaagtctcgccccctagtaatcatcgtgggggtgctagtggcaatttttgggttgctactgctagccaaagccatattgccggggactttaagcaaacatgcattaagggacgagcgcgccgcctacgttgccgatgactcggtgatcgcctccgggatttcccgcttggtgcgcgaagaggccgggctaccccagggaacagtgtctaccgcggttagtaaacgccgctcactaagcaccatcacccccagtaccggccgccctctagaccaagggcagatgacacagttcacgaaggatgaagtttcttcctggcagctgcagccgcggttaaaaaccactgttaaggtcgcccccgaggggaggctggagaagtgaagaaactaccgcgggcattgaaccggattctgctgtttgtctttggtctgcttttcttagccaccggagcagcgctggtggcagtggcaacttatgcgccgctgcgcgacctggtgcttaaatatcgctcacgtcttgacagcgaatacgcttcgctagcggggcaagcaacctttaaagtgtccgggcaacagttttcctgggtacaagtgggactgattgcggtcgcgattattgtcgccctcttgctgctcagctggatattttcccagggaggcggcaagattcgctcactggctttaaataaggctggaaaagattccgaaaaagagggcgagattaccgccgaactgggcttaatccgggacattatcgacgacgcagtcagcgacagccgctggatctcgtccttgaaggtggcttcttgggacgtgaagaaacagcccggactgctgctaagtgccgcagtttataagggagcaaatcctcgggaagtaaagacagagcttgaccaggcaatcgctaggctcgatcaagttttaggaataaacatgccgattttggtacgactaaccacgaattggcgaagtaacttaggatctgcggaccgcgtagattcatagaaaaaataaaggagaacaatatgggattggacgacaagattaagaacaccgctgaagatttgggtggcaaagctaaagaagctgccggcaaagttagcggagacaagaacgtagaagccgaaggcaaagttgatcaggtcagcgcagaaatcaaagacaaggtttctgagtttaccgacaaggccaaggacgtggccgaagaagccggcgcaaacctgaaggctgctgctgaaaaaatcaaggaaggtttctctgacgataagtaaatccagagaaaactaagctttaaaatagctatagaaagggatcgggaggcaaccgcctcccgatccttttatgtctagtctcctaaaacgctctaggctctaaaattgcactttccagagtacaaattcccagttaatccagtagggagggggaaactttagtttcctccccaatgcgcatatcggcgatcttcccggcggcccgcagctcttttagccgtggaactacccgcttagaaatcccccaaggatcaatcgtatttaagtaaatccgggtaccgccctcaaatcccgccaaagtcgaaatccgccatttcaacaagattcgccaacgcatcggggtcgaaaccgatagcggacggtgataccactcttcattacagggaacatccgccccggtagccgcatggatagcgtgcaaaatatcggatactgcccgcactttcctttcacccgcatcccagggattacaaggtttgcccagtggccagactgcaatcgtgggatagcggtgccccacccccgccatcgcaatcgcgtcctcgttttgcgccaagatcaggccgcgagaagcccgaatcttcaaaatcgtatggtaaatatcggggtctttacgcaagcgctcgcgttcctgcgcggtctgaaccggaaattcgtcaattgccaccaactgtttatgcaagtgatcaaaactggcacccgccggtttcagccagttctggaaagtggccacgtatttaactgccggatccaggtcgtacaggttgcgcaaggtgcgggcagtaaaagcggtataagcattatgctcatcaggagtgagcgtacctgccgaagcgagctgggaagaatcagtcgctccgggaacaaaatgccgcttagccacaatcaagtcatggccacccgaaaagaacgagctggcctgccccaacatttccggttcgctgaggccatcgatttcggcgtcattcatcccgtattggtgcagcttagctcgcactacccgcagcacatggtcatagccagtgggggtggacaggtattccgccatatgttggcgttccttatcggaaggctcatggccataattaagattccaatattgataggaaacaatctcgaacaggttgggaatccggcgaaaatctgccgggtattggcttaattgattggccgctaacccctctaccagccggaaatccccgcagctagtagttttatctgccgggagttcttgatcccccaggacaatccgggatttttcgggcggggtttctagatagcgatccgagcagaaagcacaactggaagtgtggtctttgtcggtaatcggcttggggttaacctgcggcttagctagggggcgatgcccgcgaccaggaacagtccacacctcggttccggtcaactgatttcgctgtttaacggttccatctgccagtttaactagggcgcgtgccgatgctgcttcctcttttgccatacttctaccctagttgtccgcgcctacttttttgcctacccgcagcgcgtgtaagtcagatgcgttaaatgctgcgggtctggtttatagtgagcgggaggaaaggagggaagttgattaaatatttaggctccaaacggaacctggtgccagctttagggactattgctaccgctgccgatgccagcaccgccctcgacctattttcgggcactactcgggttgcccaagagttcaaacgccgcggaatgtttacgactgcctgcgacctggcctcctatagctaccaattggcgcgcacctatatcgaaaccgatgccgacaccgttgaccttgcagccttgcgggcgcatctagcgaaaatgagcgccttggacggtaaagagggttatttcaccgagaccttttgccgccaggcgcgctttttccaaccccacaacggagcccgtatcgatgcctgccgagactacctggtgcccttgacagactatcccctgtttccaatattattgacttccctgatagaggcggccgaccgggtagattccaccaccggagtccaaatggcgtatctaaaacagtgggcgccgcgctcctataaccagttagaactgcgtttgccgcagctgttatctggaaaggggcgggcgctgcaaggcgacgccctacaactggttgaccaggtacccgaagtcgacctcgcctaccttgatcccccctacaaccagcatcgatactttacgaactaccatatttgggagaccctggtgcgctgggatgccccggaaacctacggggtggcacgcaaacgggtggacgcccgcggcgatgaacaccgctcagtctttaactccaagcgcactatggcacaaagtttcttttccctactggggcgggtacgcgccaaaaccatcgtggtttcctataacgatgaagcctggattagcgaagacgagatgattaacgccatccatgaggccgggtttgcacgggtcgagaaattttccttttcccaacgccgctatgtgggggcaaaaattgggatctatgatccccaaggcaaaaaagtcggtaaaccgggagcagatcgcaatactgaaaacgtgttcgtagggggcagcgccgccaccctttcccaaatcagcgcggctttggcgccctaagcacgaatccgctaatactggagccagcccttagcttgctgggagagctgctctaaaagagatatcgcttcttgcgcccgcgctgccggcaccatcagatgatcgtggtgcagaccggataaaacattgcagggaatagattggctggccagctgggaagccaccgtgaaagtgagcccggtttcttctaaggaaacgtcgcagtccaaagtgatacggcggtatatcttttttccctcagccagtcccgcagcttttgcctgctccaagggcaccactaaggtgagtccttcttcctctttgatctgggcgaatgagtccaacccagcgggtaaaccatcctgctccgacaagaacacatacttgccaaacatatggggatgtagcttagacagcgctaggtcaaagtcagaataagaactcatagttttacggtatgaggatggacgctacccgtgctttctaatctcacactacggtcgattttttaaagtttaagcaggctaatgccaaaactttcaggcaatgctcagtaactcgttttagaatgctcgctccctaaaacccgccggggaggacgcagcccttgcccgccctcgctgtaggttaataccggcagcaaaggttaagagattcgccgataaacgctcattactgcccgcgccaccgccgagggcgactctaaaggtaccaaatgcccggcgcgcggcaccgaaactacccgggtgccgagtgccttagccatagcttcggcttgggcagccgtagaactttgatcttgctccccgcgcactaccattgccggaatctgtgcccgctccagggtttccaggcgcccaggacgcgccgctaacgcccgctgcgcccaagaaatcgcttccccgggagcctctctaatccacttttccatcaactccggaatcttggggaaatccgtgagagtttctttggcgagcatagtggggatgccctccactagttgctcttgcgccctgcctaccagcgcgcctaccgccatctccgtgcgggcagcccgcgccttaggcgtgtcaatatcggccttggtgcctaccagtaccacacccccaaccagtcgcgggtgacgctcaatcatcgcctgcgcggtgtgtcctcccatagagttcccacacaccagcactttttcggcgccctccgcgcgtactgcttgggctacatagtcagcatagatttctaaagagggcgggtcagttgggagcggagaatggccaaaccccgggggatcgactgcgattaccggcacgccctcgaaacggcgcgccaccccttcccacattcgatgatcgtaggggaaagcagctaataaaactactgcgggggtactccctattctttgcgcatcgcgcgtaaaaatcgccacgttcataagcccatcttcgcacagctaggggcgaagcttaaggtaaatcggcgccagagttggggttttccagaaagcgcgacctttgcggatccactagcttagttaaagaccacgttcccaacaggagcgatgccagtgccggcgctcatctacggcggagcgctggccaaaaagagaatcagttcgccaagccaccacctgtgcctgaccgatctggatttcttggctacacccggggcaacgatagaccttgcgtgcctgcgaaagatactgcacctgatagtcaccatccgcgcgggaaaccgaacgcggcatagaagctaaggaatccatccgcaaagggcgatgctcgccccagggacgcttacgagaacgcctggccacttaaaacgctaaggctccccgcttgtagacccgcatgggattcaaatcggcatcggtaaccagtaaatcagccgactttccggcggctacttcgcctaactgggagttacccaaaatttttgccccctgcaccgaggcacaataaaccgcgtctaccagcgggattcccgcctgatgcgcgattttaacctggttaatcagatgggaagttcccccggcaagtcctccgcctggctggctgagcttagctacgccctctttaacggttaccgttttcccgccgaggacgtagtcgccgtcacccagaccggtcgccgccatcgcgtcggtgacaaacaccatctgttcccgcccgatcagttcatacacattacgtaccagggaggacgccacatgcaccccatcagcaatgatttcaacaattacgccgcccccggccgcatccgccaagatctcgggtaccggccccggatcacggtgatgcataggtgccatcccgttaaacaaatgggtaacggtggcgtgcgggcagcgggcgcgcgcagaatgttgcagagtttgccgcacctccaccagggcatcccgcatcttttgggagctggtatcggtatgcccaaatgaaggcaccgccccgccggcaatcaaagtttctgccaccccagacggccccatcgcatagggtttttcgggagcgaaagtcatcgataccgcatagccgcgcgaaataattagtagctcgcgcgctaagggcgcattgggggcttgaatatgcgcgggatcttgcgcgccgcaatgaccttgcgcaatgaaggggccttcaaaatgaatcccggctagtttgcccgcttcgcacagctccgccaggatttctgccttttcccgcaacaccatcggggattgggtgaccagtgaagctaccagggaagtagttccccagcgcagatgttcggacactgcggcgagtgcctgttccttggtttgtatgtcggggaaagaggatcccccaccgccgtggcagtgcacgtcaattaaaccgggaagcacgtagcgatcatcactgggagattccgctgctaggatttcatcgccgaacccgacttctttggcggcggttgcctcccccacccagacgatggcatccccggatactaccactgccccgtcggtaatgatgcgattcgcggttactactcgtccgcgtagtgcaaaaacttcactcatagctgcaatgctcctgcccgatcagttttattttcattgcttaaaataggcgcgattccgcgtcgtccacccctcgcatcgtatcgtaatccaaggttagacagcgaattcctctatcctcggctagcgttctggcctggggtttgattacttgcgccgcaaagattccccgcacttccggcataatcgggtcgcgggaaagtaaatctaggtagcgggtcaattgttccaccccatcgatttctccgcgccgtttcacttcgatggcgacgtgattaaggtcggggtcaaaaaccagtaaatctaccggacctaccggagtgggatattcgcgccggattagttcccagccgtcacccaggatttcggggacttgcgccgccagcaactcttgtaagtgtgcctctaccccatctttttgcaatcccggatctattcccagttcgcagctagtttccgagaaaatctccccgattcgcagttttaactgatccccagttttcgtcgattccactaaccaaatctgctccaccccggcggcttcgtcctcggcgtttagctctagttcttcgacagtggccgggcccgccatccagttaagaggtttgtaggagccgccatcacagtggataagcaccgaagaatcggctttcaccatgatcattcgcggggccatcggcaagaaagagtttagacggccgctgtattcgacagaacagttagcgaaaaggacgcgcatgagaacctattctaggggaagaattttaattccaagattgggggatttcccgaggaggcgcagcctctgcccaagatacgaggccggcgtggtcatcctcggaaagaaacagccaaaaacgatgggagccgacagtaaccggtaccgctacgttgcgcacgccttttttggagaggtagttgtgaactttacctagctctacttgtcgacgtggccaggtcttatcgggacggaaagaaagccctgccgccttgtaccagtttaaagtctccgccttgtaaacagcgcacccttcggtccaaccagaggtgacatcggggcggtaagagcacaagaaagcaccctggtgataaagacgattcattctccacaagaaataggcggcgattagagccactagggcggcaatcaccaagaggattagcagaaaaactttaagcgccgtcatggcctaactataacccttaaaaacgattattttcggcttaaagcccgtcaactacgatggttaccttatcttcgtcaaccgaaacaaatccgggaaccacttcaaactcttgggcgtccggatcgttttccttcttgcccacttttacttttccagcggtaatagtggctaaaagaggctggtgaccagccataatacccacggaaccttcggttgtgggcagggagacgaatcccgcctgcccactaaaaagctccccagagcgggtaactaatctaaccgaaagcgaactcattacgccgcttccttctgcagcttcgcccagttgcgctccagatcctcaataccgccgatattgaagaaagcctgctccggaatgtggtcgtacttaccttcgcagatacgcttgaacgcttcgatggtttcagatagctccacagtcgagccctcaacaccggtgaacttctccgccatataggtgttctgggacaggaactgctgaatccggcgcgcgcggttgacagtgagtttgtcctcttcggaaagctcatccatacctagaatcgcgataatatcttgcagctctttgttcttttgtagaatcgacttcacctgggtggcaacttcgtagtgttcttcacccacataggtgggatccaaaatacgcgaagtagaagccaagggatcaaccgccggatagagaccacgcgaagcgatatcacgcgatagctcggtagtggcgtctaggtgagcgaaagtagttgccggagccgggtcggtgtagtcgtcagcgggcacgtaaatcgcctgcagcgaagtaatcgagtgtcccgcaaccgaggtaatccgctcttggagcagacccatttcatcggccaggttcggctggtagcctaccgccgaaggcatatgcccgagcagggtcgatacctccgagcccgcctgggtgaaacggaagatgttgtcgataaacagcaacacgtcctggttttgcacatcacggaagtattccgccatggtcagaccggttagcggaatccgcagacgcgtccccggaggctcatccatctgcccaaagaccagtgcggtcttatcaaagactcccgcttcatccatttcgtgaatcaggtcgttgccttcacgagtacgctcgcccacgccagcaaatactgacacgccgccgtgatcttgggctacgcgctgaatcatttcctgaatcagcacggtcttgcccacacctgcgccaccaaatagaccaatcttgccacccagcacatagggagttagcaagtcgataactttaatccccgtctcgaacatctgggttttagattccagcttgtcgaaggagggcgggtcgcggtgaatcggccaacgctctttaatatcgagggtttcgccctcttccaggttgaggcagtcgccagtcacgttaaatacgtgtcccttagtaacgtcgcctaccggaaccgaaatcgcggcaccggtatcggtaacctcttgcccacgcaccagaccgtcagtgggctttaaagccaggcagcgcacgatgtcgtcacctaggaactgtgccacctccaaagtgagcttgtgcggggtatcttccccttcaatctggatcatggtttccagcgcgttatacatttcgggcagatgatccggcgggaactccacgtccacaatcgagccgatcacctgggaaacccgtcccacgcccgtagtccgttcggtatcactcattagagtctccttattccttgtttcctctagcgaccagcggccaaggcttccgccccgccgacgatctcagttatttcagtagtaatttctgcctggcgtgcattattggccaggcgagtgtaacgctcaatcatgtcatgggcgttatcgtttgcagtgtgcatagcggtttgccggctagccagctcgctggctgctgcctgcagcagcgccgaccgaatccgcgagcgcacatacatgggcagaatctgatccagtactgcctcggggttaggctcgaaatcatagagtgggggaactttaccctggggtggatccaggttaatatccatctccatctctacggcttcttcttccgatatgacctccagaggcagcatcttgcgcactaccggaacctgcttaaccatattcacataccgggtgaacaccaggtacacctgagctacgccctcgttaatcacatccgccaagaaagcttcggtgaggacgtctgctatctcgtaagattgctcgattgtcggggaatctgaattcccagtccacgagcgcttaaccggaatcccccggaaccggaaataactttctgctttgcgcccacagctgtacagtaccggctctttaccctgctcttttagctcttcaaccaacttttcagtttcccgcaagatggaagctgaataggcaccagccagaccgcgatccgaagtaacacacatcaccgctacccggttagtgtccgtacgttcacgggtaactggatgatcaaaggaagagtgcatcgccaaagccgccaaagcctgggtaatcgccgagtcgaagggcgtggactgagtggcagctgcgcgagccttcccgatacgcgaggccgcaatcagctccatagcatgaaagaccttagccagcgtctgcgtggccttaatcttctgcttatatatccgctgctttccgctcaaggctaatcctttttgtctttcttgttatggcggtctaccaccagttgttcgctgtcacgctcggcttcggaaacctcctcgggaatctgaacttccgattccagcactccctgagaagaaacgaagcccgcacggaacttctccactgcctctttcagagcttgttcggtgtcagaatcaaactgcccagtttccttaattttggctggtatatccgagttggcgtgcagataggcaagcatttccgactcgaaacggtgaacatcgctgacttcgatgtcgtccatatatccactgttaccagcccaaatagagcaaacctgatcttctacctcgtaaggggtggcttgcggttgtcgcagcagctccatcaggcgttccccgcgggttagctggcgtttcgtggtggcatccaaatcggaagcaaacatcgcgaaagcctgcatatctcggtactgtgccaaagtaatcttcagggtaccggaaactttcttcatcgctttgacctgcgcatctccgcctacacgagaaacggaaatacctacgtctaccgccggacgctggttggagttaaacagatccgactgcaagaaaatctgtccatcggtaatcgaaatgacgttggtggggatataggccgatacgtcattgtctttggtttcaatcaaaggcaatccagtcatggagcctccgccgagctcatcagaaagcttggcacagcgctctaggagccgcgagtgcagatagaacacatcgcccgggtaggcttcgcgccccggcgggcgacggagcatcagggaaacactacggtaggcttcggcctgcttcgaaagatcatcaaatatgattaggacgtgtttgccctggtacatccagtgctgaccgatagctgaaccggtgtagggagccaggtacttatatccggcggaatcagaggcgggagccgccacaatagtggtgtattccatggctccggcagcttctaactgcccgcgcacactagcaatcgtggagcctttttgccccacggccacgtaaatgcagcgcacctgcttcttgggatccccactttcccagttcttacgctggttaagcacagcgtcaatcgcaatcgcggttttaccggtctggcgatccccaatgatcagctgccgctgaccccgcccaatcggaatcatagagtcgatggctttcaggccggtctgtaggggctcatgcacggatttgcgcatcattaccccgggagcctgtagctccaggacgcggcgtccatcgatatcttgaatctcgcccatgccatctaggggctgccccatcggatcaaccacccgccctaggtatccgtcacccacaggaacggatagcacctctccggtgcggcgcacgggctgaccttcttcaatacccgagaagtcacccagcacaatcgcgccaatggtgcgatcttccaggttcattgccaatccggtggttccgtcagcgaacttgagaagttcgttcgccatcgcccccggtaagccctctatccgagcgataccatcagccgccatcactacgtgtccgatttcgtcctcggtagaacgagtgggctcgtaggagcttacgaagtccgcgagggcgtcacgaatcttctccggttggatttgaagttcagccatgaaattgccttttcctaacgttccggtactacccggccagtttttgctttgtttcttgaataatagtggcgagagagccatcgaaaatctgggaaccaacccgaactttcatcccccctaccaccgaaggatctacgctcacctgtaggtgaatgtttttctgatagcggcgagacaaaatatcccgcaaacgctcagcttgcgccggctccaagggcgttgccacctgcacagtagccaccagataatctccgacagccgccaagtcgcgacgcatatggcgtaggtttcccgtcagggaaaccgcaccctcaattttggagtcgcggctaacagagctaattgctcggttagccaaagtgatcgtcggacgcgaaagtgccgagccgagtagttcatttagtaagcgcacccgatatttcgggtcgcggttgcgatccgaaagtgccgaacgcacctgctggttagcgcgcacgaactgctccagggagaatacttcatcggcgatctcaatggtcttgccctctgtctgggcaccatatcgcaccgcatattcacctagccgctcaataacggtaggcaactctggggagctatgtgcagttgccaaagctgctatcactgcttccctggcgacatctgacaggttttctgccagggcagtgagcaagccggatcgatcctcgtggctacgagccggatcagtgagcgccaaagcaactcgagatgagccctgtaccaggtctgagagcgcgaagaggtcatctgctaagtcgtagcaagtatcggcatctgtgccctgctgcccgactataacctctttgcccttctcgagggcgtgcctactggatgcgcgcattatttcctaacactttccttttccgaggaggcctccagctgatccaggaaacgctcaatcacccgtgcggatagttcccgatcggtcagctgttcgcccacaatgttctctgccaggtccgctgctagcatcccaacctcagtcttgagagagatttctgctgcctgtcggttggcctctacttgccgctgggcattagcactgatacgttcagcttcctcgctggcttgtgtctttgcttctgccacaatccgcttggcgctttcttgcgcctcggagcggatttgagctgcttcttcgtgagccttgcgcaacgccagttcagattgggtgttagcatcagcgatttctttcttcgcttgctccgccttttccaaaccatccttaatggtgatggcgcgagtttcggtgatttctttgtactttggataaacgaacttcaaaatcacaaagaagaagattgcgataataatcgcagaccagactaactctggaatcgctggcagtagaatgtggtggtcaccttcctcgcctgcccgctgaatcatgtacaacattgagtttccttttgaggattagaacaagaagccggcaaccaaaccgattagtgccaacgcctctacgaacgcgataccgatgaacatattggtggttagacgaccaccaagttcaggctggcgagccagagattcctgggtcttaccgattagaagcccaagaccgataccgggtccaagacatgccaagccgtatccgatagtagctatagatccagtcattattttcttctctttcttttctttatttgtgggttttcccgccgaaggcggaagtcttagtgggtgtgtaccgattgttctacgtacaccgcggtgagtaccgcaaatacataagcctgaaggaatgcaacaaaaatttcaaaggcggttaccgcaatcgcagctaggaaggttaccagcgagagcacttttagtcctccggccgcggtaagcaagaaatagttggatgccaaaattgtcagtgccagcagcatgtgtccggcgaccatattggccaaaagccggacgaacaaggtgaaaggacgcaccaggaaggtggagaaaaactcaatcggagtcagcagaatgtagagcaccttgggaacgttcggaataaatagcgaagacttaaagtaacctccaaagccctgagcccggattccggcgatgataaacaaaaaccaaacaaatatcgccagcagtagcggaatgcctgccactgcactaccagcgatgttaagcccaggaataatgcccccgatattcataaacaggacggtaaagaagattgcggtaacaaaaccgttgtatttcttcgcgtattctttacccatcacctgctcagagatattggtgcgacaaaaatccaggagatactccatcgtagattgcgccgtaccgggaatcatttttgcccggcgggtatagagcaccgcgcaaatcaagaaagccactaacagaacaatccgcactaaggtgatgcggttcatttcgaaaggggttccggcaaaagcaatcaccggggggaagaattcatcaatagtaggtgcctcgaaaccgccttgcggtaacagggtggtgagcccactaagcatcggtgacactgtctgttcccttcatttctgccgatttggccgaaaactgtgattcggactccattctaacgctttcatagcacttcaagagaccgcttcaaaatatctctagattaacttaacataggacacgcgtcgctgagaactaaaggtgctagtgctgcgcatttactgtttctatagtttctcgataatcaatttattggttttagataccgcacgcgcctcgccaacggtggttagtaaaatagcgactatcaatactagaaagattaccgtgttatcaacctgtggcaaagggcgcagagccgccactgccacaataactatgaccagtttcactaaataagccccgaaaaccaccccgctagtgcgacggggattgcgcagcactagctgattggctccgattcccaccgcggccacaatccacataatcgtcatcccggcgaccgcccccagcagccctggccaggaacggattaccccggccaacggtattgctaccaccgttaagacccctaaaatcagggctactacccggttacctctgcgaatcgccgcgcgcgccccgtagcgatcctgaatagaggaggtagcgctggtcagactagttttttccaggcctttgtcggcagtgctttttacgtcacccccctgcagctcagccgctgatgcatcctcgttcataaatcctccttttgtcgctggtggtgcggatagggaccagaagcagcaaaataatcactccgcaaacccggtaaaaaagctatggtaactaggaaacacagaaccccaccaccgcaggccagcagcagttctcccagcgggcttagtttcaagaaactgactgccagtagagaaataaagaatgcccaaagatacatcaccaagactgcgcggcggtgagaatgccccatttttagcagacgatgatgcaagtgctggcgatcgggcttgaaaggactctgcccacggctaagccgacgaattactgccatcaccatgtcgaggaacggcaaaatcattaccgcgataggtagcaacaccgggatggcagccggcaggaattgcgacctgcctaaagaggcgggatccgtctgcccagttaccacaatgaacatgcaggaagtagtgagccccagcaacatcgaccccgaatcacccataaagattttggcgggatggaagttagaggttaaaaaccccaggcaaaccccgacgattacgattccaatcatggcagcgaaggaagcataactttgggcgttagtgaggcgaatcagcaggtaggaataaacaaaaaacgctccggcgccaatcagggtaattccggcagctagaccgtctagaccgtctacaaagttcaccgcattggttgaaaccacgatgatgagcacggttaccagaatcgacatccgggtggagggaatagtcattccaaaaatcgggaaagaaactatttgaatgccctgccaggctatcccggcggcgattaaaacctgtccagaaagctttgtccaccagttcaaatcataaatatcgtcgattattcccaaaactgcgattgcgagagatccaaagattagcgcccaaacttggggatcgctgtaaaactgcgagaaatacggggtttgcctcgcaattaagaacgcccctaacagtccagatagcatggcaatccccccgagacgcggggtgggtacggtatgcacatcgcgcccccttaccggggtcaatacgtgcagtgccaaggaaatacggcgcactagcggggtcactaagaaagtaatcgcgcaggcgattactccaagtaacagataggctttcacagtttttcctagtctttcggctctttgcccgctactgcagataaccgcgcaggcgcgatggctcctacccgtatcagcgaatagtcttcgtcctctactttaactatggtggagggctcaccgattcgactgggacccgcatccaggtatgccgccaccttgtccccaaaatactttttggcttcggcggctgactgggcaggaggaagcccgtggagattggcggaagttaccgctagcggcccggttgcggtcagtaactgcaaaaggtctgtttgattcggttgtcgcagcgccaccgttcccccggttactcccagatcaaggggtaaatctgggcgggccggcagcacgatagttagggcgcctggccagaaactatccatgaagcacttggccaggggcggaatcttcggaaccaaggaagcagcttgagcgatactattgaccaacaccggagagggaaagtctcgtccccgacctttcgcggtcaacagcttatcgactgccgcagatgaaaaagggtctgccgcaatcccatagacggtatccgtgggcactaccagcaggtttccagcagaaatctggtttttcaggcaagagatgtcttcgggacttaagggagtacgcatacttcgatattaacgttttaggttacgttcccgtccataggtggtgatggccgctcctacccagatacagaccaaggaaatacctgttaaccaaatatcgcggctacccccagtttttgctaactcacccgggctatcgggaatgctttcctgcggggaagacggggtttcactattttggggagagggggtagttgctgccggttcgggagatttagtgacctctaccgccgtggtggcaggagggcgatctaaaggagcctcgacataattcaaagtgggctgaggagtggggtcatccgcgaaggcagtagaagtaagaactaaaggcagcaaagctaccacggcaatagcaagtaccgtgcgaaaactgcgcgccatctccgcccctttctcctatcttccagccactttaccttaacgttagcagcatctaaggcagacgttaatgttatctttactttcgcgccaataggtatcgaggacgaccattaagatccgggtgcgtcctcgcttgtcgaaaaccgattttaccagcataatcgcataggatttccccttgtgtggggtcatgttccatcgccaaaatcccgtcttgccccagcagccggaaagcttgtttaacggtttgtttcggaatgttgagaccatctgctcccccaccccaaagggcgagcggcggatcctttaatgcttctggctgggtgatagtgccgggcggtacatagggcgggttgcttacaaccaggtcaaaagctcccgcctctccctcccaaagctgcggatcggcgacgtctgcgtagctcacggtaatccgccgcgctaaatctgaatagcgttccaaatttttctgcgccactgctaaagcttttttgctgatctccaccataaagacctcagccgagggcaattcgcgggcaagagtaagggcaatagcacccgatccggcgcataaatctgccgcgagttttgctttccttgcaccctggggacgcagcgccagttctactagatactcagtttccgggcgcacaataaaaacatctgggctggaaaccaggcgaaaagccccgaaatgcatttcttttagcagctgttgcagcggctggtgagtacaacgctggctaaccaaatcacggaaaacttctgtttgcgtagctgacaatacctgaggagcaaataggaattctttagcttcacaggcagcgcaatatagtgccatgatttctcgtgccggctcgattccagcttcagcgtaacgccctcgcgcccagctaaacgcttgctggcgagaaaaaccgacctcgttcatcgcggaatcgccgcgcttatttgtccgactgcccggagagctgctgcaagcgatgttcctcatcaagtttgatggccgaatcaatcaccggctgcaattgcccattgagcacctggtcgaggttataggccttgtatccggtgcgatgatcggcaatccgattctccgggaagttataggtacggatacgttcggaacgatccactgtacgcacctgggagtgccgctgctcggcggcctcggcctcccgctttgcctcttcttccgcctttagacgcgcccggagcacccggaaagctgcctcacggttttgaatctgcgacttctcgttttgcatactgaccacgattccggtgggaatatgggtcaggcgaaccgcggaatcggtggtattaaccgactgcccgcccggaccggaagagcggaatacatctacccgtacctcgttggggtctatctctatttctcccgcgtcttcaacctcgggcattaccaacactccggcggcggaagtatggatgcgcccttgggattcagtaaccggcacccgctgtacccggtgtaccccgccctcgtattttaggttcgcccagactccgtcctcgggagctacatttcctttagcttttatcgcaatttgcgcgtccttgattcccccgagatcattcactgtggaatccagcacctgtaggctccaacctttagcttcggcgtaacgctcgtacattcgcagcaaatccccggcgaagagggcagactcgtccccaccggcacccgctttaatttccataatcacatcgcgagcatcatcggggtcgcggggagccaagactttacgcagcttatctaacgcctgactttcagtttgctccatctggggaatctcggaggcaaaatcggaatcttctttcgccagttccctgcccgcctgcaggtctccttccgcgcttttccaggtttcataagccttagcgatctgcgctaactgcgtatggcggcgcccaatcttgcgggcctgttgctgatccttttgtatctggggatcgcccattttcatttccagttcagttttttctgcgatgagagcctgaacagcttcctcgtcaatcggcgatcccacagttgctccttaaatctttgcgacctgacttctactctacgttgcctatccccggggcgaaaaccagctttcgctaggaagcgccggttaaagcctttctcgaaccaaagaggcagggtgatggcaaattaaaaaggtgtggccgaccaactggccgaccacacctaataaaagctttactgttcgcgcttgcgcttgccgtagcgagcttcgaagcgagcaacccgccctccggtatccataatcttttgcttaccggtgtagaagggatgacaggcagagcacacgtctacccgcatggtgccggacttaatggtagaacgggtttcaaaagtattcccacaggtacaggtaaccgtggtgggaacgtattcgggatgaattccctgcttcatggtttctccttgaggttcttagggcgccgggtccaaatgcaggttacaagaggtgaaccggaaccggattagattatgccacttcgcgccttggtgatgctacttctcgggcaaaaatgtggtgggcatgacctttccgggtggcttcttctagccgttgttcgccatttgaaaaatgaatcttataacaatctcataacagacaagaaaacagcagggcatcagtgctggtaaagtggggcaaaacctacttctacctgcaattgtgagcagacttacccacgctggggatagttaaagcctaaaacgccgttaggatgaaggtgttgttttgattcgcccattttggaagcccgatattgatgtctaagaaaacaaaaataactgttggggtagtagttgccatcctggtgacgattatcgccgcgttcgcaatctacgtttcctactacgcagttgggaagaaagcactgcccggcaccaaggtaggggaagttacagtttccggtctaactgctagccaaatcaaaaaacaactcgacaccgcggaaacaaataacaaagttactttttccggacagggaatcaaggaaacttcgctgactcccaaggaaatcgggtatcaggtgaattcgacagaaaccgcccggaaggcgaccgtccgcaacggtgccttcagctacgtaaccagcctgttcaccacccgccaggtaaacattgttcatgacttaaaacctaaagttgtggacaaatggtcacaagagttacccacggaaacttcgaaactacagccggtaactgagcctcaggtagaagcaaactccgaagcaactgggtttgaaataactcccggtaaggacggttttggagcagataaccgcgctatcttgatggcagctgccaaggtagtcgccacccagaaggatcaaaacgttcccctgaaaattggtaagactatgcctttggcggaagcgagttgggctaaacaactggctgctaatgccaaaaaattagctaaaaccgaggtaacggtgaaggccggagaaaaggatatcgttgccacccagcaggatcgggtttccttcgtgaaaatcccagatgtcaccatgaatcctaaaccgggagcagatgggaaagttatcagcaactggataaacgagaataaagaatctgttgaggtagaaaaagttaacggcaaacgcttcgtaaatagcgaggggaaggtacttaaaaccgaaaccgaactgaaagatggagttaaagtcaccaacgctgatcagctggtaaaagaaatcaccaccaactttgccgccggaaaagacagctcggtagcctacaagaccgatgttgataaagctactaatgaagacaagaccattgccgatggggcggaaaagctggcctatatggccgggcctggtgaaaaatggattgacgtaaatctttctaactacacggttaccggttatgagggtgccacggtagttaaaggaccaacaaaaatggttcctggcgcccccgctacccccaccattcaaggaacctttgcggttgaacgtaaagttcgctctgacactatgcggggatttaacactgatggcagccggtacgtaaccccgaatgttccttacgccatgtacttctccggaggatacgcgcttcacggagcaccctggcgtggttcctttggatggggaggaccaggcggttctcacggctgcgtaaatatgcccgtacccgcagcgggcgagttctacaactgggcaccgataggaacagtagtagtctctcaccgctagttacattcccgaagggattccagctatcgaaatcccttcgcagccggtttcacctgctattgtgagcagacttacccattttgggtgtggtcagcgatgcaaagccagctaggatgaagatactgtttggattcacccattttctgaaaccccgatatccatgtctaagaaaacaaaaatcactattgtcgcattggctgccgcgctggttacgattatcgctgcctttgcaatctacgtttcctactacgcagttgggaagaaggcactacctggcaccaaggtgggggaagttaaagtctccgggctaactgctaagcaaattaaaaagcagctagataccgcagaaaccaagtaccgggtcactttttcgggacatggggttaacggaaaatcgctgacccccaaggaaatcgggtatcaggttgattcagcggaaaccgcccggaaagcaaccgcgcgcagtagcgccttcagctacgtaaccagcctgtttacctccaggcggattccgatcaagcaccaggtaaacgcgcaggttaccagcaaactatcgcatgaacttactaaagatattaaaggcagcaaaccggtcaccgagcctagcgtgcaacttaacgccgaggggactggttttaaagcgattccgggtaaggacggattcggagcagatactaagaggctactagcaggcgcggataaggttatggctagtcaaaaaaatcagaagatgcctctgactatgggtgcagtcaaaccactggttgatattaaattggcacagcagttagcagacgcggcagaaaaattcatccaaccacaggtcacgataaaagccggggataaagaaatcgtcgctgaccaaaaagacaaggttagtttcgttattgttccggaggtcagtcggcatgccaagctcactaccaatgacaatgccgtggctgactgggtaaacaagagtaaagaagccgttgaggtaaaaaaggttaacggccagcgcctggttaatagcgcgggaaaggtactaagaactaaaaccgcatcaaaggatggagtcaccgttactaacggtgaccagttggcaaaagaaatcgccagtaactttgctgcggggaaagacagctcccttgccttcgagactaaagtcgataaagccagtaatgaagataagctcattgccgatggggcggaaaacctggcttatctagcagcgcccggagaaaaatggattgatgtgaatctttctaactacacggttaccggatatgagggaaccacggtggcagtagcgccgaccagcatggttcccggagctcccgctaccccgacgattaaaggaacttttgccatccaacgcaaactacgattcgacaccatgcggggatttaatacagacggcacccgctatgtgacaccgaacgtcccctatgctatgtacttttccggaggatacgccctccacggagcaccctggcgcagttcctttggatggggaggaccccgtggatcccacggctgcgtaaatatgccagtttctgaagccggcgagttctataattgggcgcctattggcaccccggtagtcgtgcaccattaaagggcatccggtgccccaccccggcatcgagggaactcccgaccagtgctcctatcagctgctgttagctgccggttctctagttggatagcagccaggaaataatcagattgccagaggcgcgcagcccatcgtggtgccagtctggtttttctaagatattggctcccataaccctgccggtgtttagcgacagggtgcggggaacgaaaatatcgtcccggtaaaccaccgcatgtaccggcacctggttttccgccagtttctgcgggtcataaagtaccggccagtcagtttctgccgccaaatcatctgctagattagctaggggtttcagcgccggatcttgcgcaaagacccagctaccaaagtgttccccggtcagataatagggtttcccccagtcgagaggatcggcgttttgcgcgaacccgggagcatttgcgcgaatccgatctgctgtccaggcagtcggctcaacttcgctttgcggcaccgcattcccgtaaatagtttcatgcaggagggcgtagaggggatctagagcaaaactgacccggcttccgacttgccctaaaaattcttgggtgaggtggcgcttgcctccggtctgcacaaaaggcgcctcgaaaaggtagcgcagattttctaggcccagggtgcgtcccagctccaggcctacctgccgaattcgattgggggtaagtttttctccattaggcaggtattcatcgtgttctagcacgtgcgcacaggtttggcggactgcttcttctattccgggcaaggcgtagaactcttggcagcgccgggcggtggccgcaaacgtgcgctcgtaaatccggtttaccttggttagtcccggcagtcctccggtgatataggctttttcgatggcctccggaaagcgggaaagataggcggtaataataaacccgccgaaactttgccccatgactgtccacttttttattcctagggcgcggcgcagcgcttccgcgtcccctacgatctggtcggcgcgcattagccgcagccaggctccggcgtgagaccccaatgcgggaatagtgacgttatcgagcggggtagatcgtccggttccccgctggtcaagcatgataatccggtatttttccagggcagctccgaaccagggggcagaccaatcggcgggacgagaacccttgcagccgggaccgccttggaaaaagatcaggtagggtcggttttcatcatcgtcgagggcgatttcgcgggcataaatctggatattggttttctggatttcggcgtctacccaagggggtagaaactggttgtctgaatccgaaatgtcggagtttttctgcgattttggccgggctagttctccgggagtaaccgcaaacagctcgctttgtaccccgctgtcctgctcatctacccctcgcgccaggtttactaccgggtttttcgccgagtccgggtacaggtttagcgccacttctgggtggtagaggggtacagtcaggacgtgttcgcggattaggtaacgtccctggcgatactccttggggttagggttttgttctaattgcggataaagagggcgcgctggcgctgctgcgggagcgaccggtttttgctggccgctagtttcgcgggagtcttctggatgtaggtattttgcggatttagcagcgtcctcagctggtgtatgggaagttcgttcactggtcccctcctttccagatttccagcctggtcctaaatccgcttcccggggagtccccgactggtatgcccgcgctactgcctgcgcatgactgtccgcttgctcattaagcgggtgaccggcgtgtccttttacccattcgaaactgaccttccccttcctagcagggtcagatagcagctggtctaggcgtttcaccagttctaggttggctactggtttgccaccgccggttttccagccttttttcttccagccgaaccgccatttggtcaaaatgttaatcacgtattgggagtccgcctgaatcaataaatcatcgtctattccggcagtttcggtcagtagatcggctactgccatcagctccgcctggttattagttcccaaagtaaaaccgccggcacgccaacaatcaggtgacagataccaacaccagccgccggcaccgggattgccgagggaggaaccatctgttgctgcgataatcatctgcaatctccttactgcacacctggaaaatcaaaataacctggggacgccggtcggcgtccccaggttatcagtaccagtatcagatctgtggttcaggcttcgcgtttgtcgctctagcctggcgattagctggcggctttaaaatctgcgaccatcttgctgccagccgtgattaaccgcctagtgccagaaatggcgggtaccggtcaggtagagggttacccctgcctcctggcaggctttgatggttgcttcatcacgaatcgaaccccctggctgcacaatcgcttttacgcccgcatcaatcagggtttgaggaccatccgcaaaggggaagaaagcatcagaggcggccaccgagccgcgtgcccgctcgggagcggcctcgccttccggcgcctgtcccaaggtgttggcgcgttgaaccgccagagcacaagaatcaacgcggttaacttgccccatgccgatgccgaccgtggcctgatccttcgccagcaaaatagcgttcgacttcactgcccgcaccgtcttccaagcaaagaccaggtcagccagggtttgctcatctgctgcctgtcccgcggccaatttccagttttctggattatctccctcggcctgcaagcggtcacgagtttgcgccaacactcccccgctgatctgccggaactcccattccactggagcatccgcatcaatccgcaaaatccgcagattcttcttagtttgcagcagctcaagcgcctctgcttcataatcgggggcaataatcacttcggtgaatatcggtttcacctgctgtgccatttgcaaagtcaccttacggttacaggcaatcaccccgccataggcagacagcggatcgcagccgtgcgccagcagatgtgcctttgctacgtcctcagcaactgcaatcccgcaggggttggcgtgtttgattaccgccacgcaaggctcgctatggtcggtggcagcccgccaagctgcatcggcgtcagtgtagttgttataactcatcggcttgccacccagctgttctgcctgcgccaggccgcactcttcgtcggtgaaacggtagaccgcggcctcttgatgcgggttttccccataacgtaagctgtgcagttccttgagctgcggtttccactcttccaggttaggcagggcactgctagcagtatccgcgtcctcgcctgggagttgcttagcgaaccaggaagaaatctgggtgtcgtaaatagcggtgtggttaaaagcgcgtgctgctagctcccggcgctcctcggcagtgaagcccccgcgctgcaaagcagccgctagatcatcataggagctgggatcaacgatcactgccacatcggcgtgattcttggcggccgcccgaatcatcgagggacctccaatatcgattttttcgatgcaatccgcaaaccccgcaccggaagccaccgtgtctgcgaaggggtaaagattgcaaaccaccaggtcaatcggggttacttttaattcttctagctgcgcaacgtgggccggcagctcccggttagccaaaatccccgcgtgaatcagcgggtgcagagtttttacccgcccgtctaggcattcgggaaacccggttacctgagaaacttcagttacctctaccccagcagcggcaatctgatgggcggtagaaccggtggaaataatttctaccccagcagcctgtaggctttttgccagtttatccagaccggtcttatcgtacacgctgaccagggcacgtttaatgggtttaatttcgctcatgacgcgggatccttttgttgcattctttgtccagcccaggcgagcgactgtccctttacgttccccagtggtaatccacttttttcgccagtcacgtaaaaaccagtctaccctgctggcttcggcgacgaaagttagtcttggtcgggaatttcaatagcttgggtggaggtatcgtccgcatcgcggtgcggtttgccagcttttagccgtcctcgtttgaaaagtgagcgtttgattgctggccgcgtgagctctgctgctgggagccgcttagcagaggattttattttttctagcacctgctgttctttcgcaataacttcatcggttttgcgttctgcccaatcggtgactaaatctttgatttcttcggtgtcagccgggagcgcgccacgagagcgggcaaagatttcttgcggagttggcggagccgggcgggtcggctctgaggactcccgctcacttgctgtttcactgtccgagttaccggtggtttcgggggtgctttcttcggggacattttcgttgttttcttcccgctcgtcctcatgctcactttcttcattagcgagagtttctggctcatcagcttcaggcagttcgcgcgtctggggaatctctgtcgtttcctccccttccacgactggggaggcttctggcgactcactttctgccgcatctgcggttgcgttttcttctttttcagtggcggtctgctcgccttctgctgcgtccgcggccttaacggtagtatcgctgctcaaaggagtccaggagcgataatctttagctttttctttcgcggctgcaaaaccttggcggctagcgcgcacactcgccctcttgaccaaaaagaatttatctaccaaataggcgcgggagtggggatgcaaaaccgttcctaccagtgtaattggcgcccaaaccagaaataatcccatggcggcaacagccaatggatgcgccccccaggcggacatccgtcccgcgccgatagaaccggagcctaagaaacagaaccacgcggtcaaaaaggtaaataaaagcgctcccaccaggaaagatgctacgtgtgaaaagaagtcaacccgagccattacggtataaaacagatatccaaccatcaggctaagtaccgcaatcaacgccaatacccaatatccgggggtttgggcaggtagcgcccccaggatgggcactgccggaatcgggccagctttcacctgagttaaagagcggatagtgccggtaccctgctggaatcccggccccaaaatccaggctaacgcccaggtctgaacggtaggcagatagagcagttgcgccaaccagatgaggacgcctgcccccagggataccccgtacaggtcatagattttatttactgccgtgatatgggaaaacacttgggcaagcaccagaatcaaggtgacaatcccgaagaacgtaaacatttgccatccggcgcgtaccccggaaactacccagccaggcaccgtccaggtgctattatttccgtcccaactgcgctcatcgcggtcgattcccaggcgacgattttccagatcttgtctataggcacggtcgggctggcgcatccgcaggatgagagtccggctccaagccgtaaaacggttaaaatcagcagctagacacgctttaggacggagcagcgaaggcttttcggtatcgaggcgttgatcgcggtcaaataggtaaaaagcgtaggcaacagcggcaagaccgtgtaggaacgcccaaaaaaacaagcctcccaaactataggctccgcggattgctagacccaccagggtggcaattgccgcttgcgcaaaaggataagcccacaggatggttttactttcgaggacgaaactatgtgctaggcgcccagctaaccacaggtaggcaatccacagtcccaaaggaatcaccgataaggtggcggctccaccgagggtgccgcttaggggaaccccgaagcctaatgcccagacgctggcgcctactgtcagggattccgtccagacagtatccaccatccaggggttgccagaggtggaaaaatacactcccgcactgatcgctaagaaaattatccagggaaatatgcaggtgatgagggcggcggccaccatccggggaatccctcgcggaatcctcacggtgagggtgcgccgccccttttgggagctagctacggttttgtttccagccgattttgcggatactttcccagcaggggaagttttctgtcttgctagccgcaatttcccgcctaaggggctccccttacctttcttggtgccgccggagccattcttgactttgtcggaatacttatttttgccccccggacgctcagttccggattttcgcgcgtttttcttttctggtttaggcgattttcctacggaggtataggcggatactttcctcgcacccgcaggttgccgaggaatctttggaactttaggccgccgtaacatccctactattgtccactttttcgcggtactgccatttaggcgcaccgcgctcaagcctgccccgcgctgaataatggttgtgggggcggcgctaggcgccgcccccacaacattttcaggtatttcaattttagctgacgtgctgtcaccagcgggaggattagctaactggcagcaactgccatttagctaagcgctttatatgcctcccgcgccagctcggcagtctgggaaggagtcttcccgacttttacgccgtgggcttccaaggcttctttcttggcttgggcagtccctgccgaaccggagacgatagcgcccgcatgccccatggttttacctttaggagcagtaaagcctgctacataggcgatcaccggtttggtgacattagcggcgatatagtcggcggcgcgttcttccgcgtctcccccgatctcaccaatcatcacgattactttggtgtcggggtctttttcaaaggcctcgagagcatcgatatgggtggtacccaccaccgggtcaccgccaatccccatacaggtggtaaagccgatatcgcggagctcaaacatcatctgataagtcaaagtaccggacttggataccagtccgatgggaccagaaccggtaatatcggcgggggtaatccccacattggactgtcccggggtaatgattcccggacagttagggccgataatccgacagcccttttccagggcggcatttacgaactcggtggaatcttgtaccgggattccctcggtgatcaccacgattagcggcattccggcctcaaccgcctctagcaccgcccctttagcgaaacgcgggggaacgaacactaccgaaacattcgcgccctctttttccattgcttcttttacggtgccaaaaaccggtaccgaaaccgttccggctttaatacctttcttttctgcggcttctcccagggggacgatatcgaaatcgaccgtttgccctgctttcttggggttggtaccccctaccacattggtaccggcacctagcattaatcgggtgtgtttgcgcccctcggaaccggtcatgccctgtacgacaatccgggctgaggaatcaaggaatactgacatttggtttctccttattcttttaccgattcttaacagccggcagcgagtttagctgcctgggcggcaccggcatccatagtttctaccatggtcacctgctgcaggttcgcttcttccaaaatcttgcgaccagccgccaccgcgttaccatctagccgcaccaccagcggcttcgtggctttatcgcccaacatttcgattgctttcacgattccggaagctacctggtcgcaggcggtgattcccccgaatacgtttacgaatactgacttgacctggggatcgcccagaatcacgtccaacccatcagccatcacctgcgcggaggcgccgcccccgatatctaggaagttggctggtttcactccatattcctcgcccgcgtaagccaccacgtccaaagtagacatcactagaccagcgccgttaccaataatccccacctgaccttccaggtgtacatagttcaagcctttttctttagctttggcttccagaggatcctcggtgcgtttgtctaccaactggtcgtgaccgggctgccggaaacgggcattatcatccaaggttactttcccgtccagggcaataatctcgccttcttcactggatactagggggtttacctcgaccagggtagcatcctcgccctggtagacatcccagagcccctccagcaccggtacggccttagcgatcagctcttcatcctcgaaaccggcctgtttcagaatgttgcgggcaacatcctcgtcaatcccagtaaccggcagcggaactttggccagtgcctccgggcgctctttggctagctgctcgatttccatgccgccttctttagagcacatcgccaggtggcgacggtttgagcggtcaagcaaaatcgagaaatagtattcggaagcgatatcggcaccagcggcaactaacacccgatgcacggtatgccccttaatatccatacccaagatttcttcggctttttcgcgggcttcctggggactgcgagcgagtttaaccccgccagcctttccccgccctcctgtctttacctgcgcttttaccaccactaggggtgcagcgagtttctcggcagctttttgcgcttcttcaggagtttcggccacgattccggctagcacgggaactccgtgagcctcgaataagtcacgagcctggtattcgtaaaggtccacttgcacgtcctctcagtaagtacctcgacatcaagatataggactatagtaccgcatatttgcgcttatttcgtcaccagaaagtgttctccctcacgtttgcgctggaacagggttggcatcagaaagctccgcgaaacccgtacggaaatgaaacatcagtaacgatgagggcgcaggtggggattttctttccttcgtgcacccgctgagcttttacgcggtcagaagcgaaaaaaataccggttcacggtacagttaagtgacagccggaacatgctggacgaaaaaccaagaaagtgaaacggaaatagctatgcttttgtgggatcgcgcagccgcgctgatcgtatgctacttcttggcgacactgctaattccctttctggtcaaatactttaggcagcgcactttttacatcgccgccctcatgcccctgggagccttaatctggacgctatcgcacacccggcaggctttcggcacgggatcgcaaggattggctgacttttatcaatggtcaagtgcgctagatttggaaataggatttcgcctaaccggcctatcatggctgatgctgacagtaattaacctggttggcgctttgatcttggtgtattgtgcgcaatatttctctgaaaattctccgcgccttcgtcaatttatcgcagctttcctaggttttgccgcctcgatgtcaggtctggtcttagcagatcacaccatgaccctctatttcttttgggaaatcaccactttcagttcctttattttgattggtcacgaggctgaggaacgtgcctctcgcgctgccgctcgccaagcgattttggtgaccaccaccggttctttaagcatgttcgccggtttcgtgattttaggaatcatgcccggaggctcctttagaatcagcgaactgttaaccgtactctcttcccctaccgccctgggcactcccgtcgagccggtggcagctatcagcggattagcgttaattctttttgcggcagttaccaaatcggcgattttcccaacccacttttggctcccctccgcgatggctgcccccaccccggtctcggctttcctgcacgctgccgcgatggttaaagctggtatctacctacttgcccgttttgcacccgcctttgccagtttccccggacttacctgggcaatcgtaggtttagggggattcaccatgctgctaggtggatactccgcactgcggcaaaccgacctaaaactggtgttagctttcggtaccgtatctcagctgggattcctgactatgctaattggctcagggaacccccaactttacttggcgggactgtgcgttttggctgcacattccaccttcaaatccggattgttcctaactacgggtactattgaaaaacagaccggcacccgcgagtttcccagcctgtgcgggctgggggaacgttcccggaaactggccatttgcgctctcgcggggattctatctatgtccggaatcccgatcaccagcggatacctcggaaaagagcacaccattaccgctcttctaggtgcaggacgcgaccttgaatccggggtgattctggcggtcctgattgccggatctgccctcaccttcgcttactcgctgcgttatttttggggagcctttagccataaacatgaccggcagggaacttgtccccatcgccaaaaactgcgggcaaccggtaaaactctgaccatcattcccggcgtacttaccggactttcgttgtgcctggggttcctgcccggtgtccttgacggttttctggggcaaaccgctgtgcaaatctacgggaaaaatccgggtcatctgcatctttggtcagggatactccccggtttagtgaccgcgctgatcctgattgcaggaggttggttgttctggagtcgcgcccgcctggcacgcttgcaacgccgtctagccttctcgccgcgttggggcgcccaaggtatttattcgcgcactatccgcagcctagaaagtggcgcctcctgggtgactggcaaggtacaaaccggatccctacctactgatctttcggtgatatttaccgttgcggtgttggcaggagcagtatgcatgctagggatttccgatatgcatcgctggcatttcgccgattccttcgggcaagcattcatctgttttgcccttatcggaatggccgctatctgcgtagttgctcaacgtcgcctaaatgctgtgctggcactttcggcttgtggagccgcagttgccgcagttttcgttctccagggcgctcctgacttagcgctaactcaactggtagtcgaagcggtcactttgactcttttcttgctggtactgcggcgcctacccgcacgtttttctcgccgcctcagccgctgggcgcccgggtaccggcttctaatggccgctgcctgcggagtgggcgtagtgctattagggctatccaccgcctctgcccggattcatgaaccggtctccaacctggtaactaccgagggtagcatttttgcgggcggtcaaaacctggtcaatatcttgctggtggacgtgcgagcctgggataccgtgggggaactgtcggtactgctagttgccgccaccggggttaccgccctcatctacctgcgaggattatctactgcgctcgctgactcccaacgcgctcgccgataccgactattggcgagggcgcgcaaacggcggggtcgcttaaaggaaacttctgccgccccccagcaaacctggctagccgtcgccactttaatcaatccgcgccgccgctctattttgctggaggtttccacccgaatcctcttcgatactttgctactggtatcggtatggctactgtttattggacacaaccaccctggtggaggctttatcggtggcatggttgccggtattgctatcactatccgttattttgcaggagggcgttttgaactgctggaggcagtcccggcgcgtccgggcggagtgatcgctatcggaatgactactgcggtagttagcgccctagtccccctggcctttggctacaccattttgcaaagcgtggaggctcaccttgatttagggatcttaggggatttgcactttacttctgcaatggggctagatattggggtatatctgctggttatcggggtggtgcttgatttgctgcagtccttaggatccgagattgaccggcagggcgaatctgcgggacaccagttgccggaaattgatattaccgggcgcgaagatccagcggatcagccgccaggctttagggacgctaagggcgagacctcagtttcgtcctccgcgagcgaaggaacaaagctcactccagaactaagttccctctctgaacctcgggaggcacaacgatgagtgtttctttatgtctacttttagctgccggcttcctggttgcctgcggggtttacttggtcactgaacgcactttgacccgcatagttatcggattagggctgctgggcaacgggattaacttatttctgctttcccagggcggtgcggccgggaccgccccgattctaggaactgccctttcaaaaatgtccgatccgctcccccagggaatgattctgactgcgattgtgctttctatggccactaccgccttcggtctggcgcttgcctatcgctcctggcgactgtcggggcatgacgaagttaccgatgacctggaagataggcggctggcaaagaaagtgggcgataccgagcgtttcttgcgcctagatttggatgaactcgacaagagccacggacgtaaaaggagggagctgtgaactttctgttggcactgccagtgctcctccccctattagcggcagctttaaccttaggattgggacgccactatcgcacccagtcagtagttgccttcaccaccctgactgcttccctggtagttgccatcatgattttggtgttttccgacgaggcaaccctggttctggatgtcggttcgtgggcggctccaatcgggatttccctggttggtgaccgtctagctgcgataatgctgtgtacttccctggtggtgatggtggcggtactggcctattcccttgcagaaggcactgtccacgagtcagaagatatccctaccccaatttttcaccccacctacctggtgctatgtgccggagttaataacgcgttcctcaccggcgatatgtttaacctgtacgtgggggtagaaatcctgctcacctcctctttcgtcctgatcactctgggaggcacccgagatcggattcgttccggtaccgtctatgtggcggtatcgatggtggggtcagcggttttcctgattgccctggctgctctctatggcgcctgcggcactatgaatatggcacagctgtctatgcggctaaccgaaatcgacccggcagtcgctatgctgatccaaacgctattcctggtgggttttggtttgaaggcggcggttttcccgctttcggcttggcttccggactcttaccctacggctcccgcgccgattaccgcagtatttgcgggtttgcttaccaaagtcggggtgtatgcaattatccggatgcaggtactgattttcccggagtcaccggtggatatagtgctagcagtggtggggattctcaccatgattgtggggattttgggggcagtggctcaagacgatattaaacggctgctttcttttaccttggtttcccatattggttttatgatctgggggatttccctggccaataccctgggggtggcttcggctatcttttacgccgtccaccatattttggtgcaaaccactttgttcctggtggcagggatgatggagaaggtgggcggctccacctcgctacgccgtctgcactctctggcaaaaatttccccgctactagccgtctggtatttaattccggctttcaatctggtgggtttcccgcctttgaccggatttttgggcaaacttggtttggcggaggccacggcggcgcgtaacactcccctggcttgggcgctgctggctgcggggctgattgcttcgctgctcaccctatatgtggtggtgaaaatctggctgcaaactttctggcagggacgtgaatctgcgcaagaaagtggcggcgaagaagaggaagcggtcgacacttttgaaactgcctcccggattccgcggggagtatggacagcaactggtttcctaactgcagtaacgatcggtatgtcggtttttgccggtccggtctatacctttactgaacgcgccacgatttctatgtcacgggctgaatatcaacgcgcgattctcggcgaggacggacgcggacacggaatctcaaaaattgctgctgggctcccggaagatttagttgctgaggtgggaagtcaaaatactccctcgggagcaaagaccagtgcgcacgactttgttctcgatacgttttcgctggttccaacggattttagcggatccgccatgatgaggggaggtagcgatgactaacgaaaaaacggacaggtctgacaaaggaaacgcagctccggcagattccccggagaagattgcgcaagtgctaacagattctgttgacgagcggaacaagcgagagggattggaagaaacccccgccagcgccaggtcgcaacgccctggtctaaaacagcgtttgcgaacactgcctcgccgctgctccttggggatgactacctggctgtttgtagtgtggctattgctgattcgggatctttcagcggtttcgatttgtggcggtttactgcttgcggtagcactgcaaacattttccccgatgccacacgtcaatccggtcaagcgttttcgccctctgcgagtaacttggctgattctgcggtttgcctgggatttgctggcttcggctttccaggtggcttatgtggttttgcgcagcaaaccggctcgtccccagatgattgaagtggagatggtgacccgctcagagttttatttgactatggcgtcggcaatgacttgcctggtgcccgggtctttagtggtacgagcccaaataaatccttcgcgcgtagttttgcacgtgttggacggacaactttcgggaggagcacggggagtagagaaatctttgcacgccctcgaaatgagaattgtaaaagccctgggtagccgggcagagattcgtgaggccgaggaacgtttgcaaagctatgaacagctagttgcggaggggaaaatcccctattcgggcaggagtccttacctacccgcggatataccccagcaacctgctagcgaagggaggcaatcgctatgaccttaattttcactttgaactgggcgatgttgtgcgttgctgaactactggcgctctatattttatggcggggaccggggattttgaatcgtacagtggcgctggatctgcttactgccatcaccatcgggattatttgcctgatatcggttactggggagcgcgatgacaccatgcagattttattgattctgactttggtgagtttcttgaccgcgacgtcggtagcgcggattattgggcagcgttcggcggcggaacaggctcacgatgctgatcctggtgctgctattaagccgcagcaagtgaccgatacgaccacggcggaaggaggacgcgatgagtgaaacttggtctaccgtcctcacatacctgggggtagcgattttaaccctgggttctgccatgacgctgattgccgccattggagtggtgaagctgccgactctgttgcaaaggcagcatgcagctacaaaaccgcagttaactgggtttattttaacctgtctgggattagtggcgattcggcaaacctggtcctggcttacggtagtgatgctggcgattgtgttgcagacaataactgcgccgattggggcccatctaattgggagaaccgctaagcaacgcggcgaaatcaaagatgccggtgagacggtttatcgccacctgcacttgccggttcccggtaaagatgcgcctgcagtaatccgagacagttaacttcatgtacacccgtaagcaaaataaaaccactctcaatgtagtttttattatgcattggatgctgtatttgatacctgaatgctgttttcccgggggtctgaagcaaaatcaccttgctagcaacatctcgatatacattgtttacgatattgctaatttccggcacggtagctatcccggtagtgagctgcatttaaaaatcaaccccgcgtagagagtaattcttgaaccgtggtaactatcgattaatcgtgttctgggaggctgtctaagcctgcctgccacttggcaattttttcgggtgcgccctgcatgtcaccgaggaacagatcaataaaaagcaggacagaatcaacaaaaccagccccatcacacttttcgtggctatctaaaagagctatttgctcgggggtagcatgagcttcgaagaaagcacgcgaagcagtgtaaagctcatcataagtcatcgttttcacccccggaatagtcgataaccgctgtactcatgtccactatgacaagcatagtcctgccttagacataatctctgccggggtagaatctttcacggctccaaccttagacccgataatcccgcgagattattcccgtaaatattttagggtcacttcagacaggggcaagggataatctccggtccttgcgtaatcatcctgtaaagtaactaactgttcgccaagggtttttggtagaccaatccgttcctcaaacgcgagcgagactatgaaatccaggtcttcgccctcgccatattcgtaatctgctatcaattgttgcactgcagggctagctgttttttcgacgtggccacgtacccttttatatagatctaaatacgtcagcatatatttaccgttgtttgatagttatcttctagatatccgctctcagacatttttagatttatatccagccttaaatttggtcataagcaatctgaactggatagagaccatttttcattttttcaatatttttaaggtccgtttcatcaattattagcgtaaccgtatcactatttgttgcctcactcccccacccagggcggattctattagcagaatctggtaaccgcgcttgacggagagaaggtgatggctataactgccgcttaaaactccctttaggtcttccggctttccccgggcgggtttcctgccaggcgtccacggtttcgggtaaccaaccgtatttgatggcctttcccgctcctatggttgcgtcaggggcggggaacgtgccgcgcgcaatatgactttttatggtgtgaggggataacccgaaccaccgagccacgccgtttacggttaaatagttaatcatgtttcttattttggcggcatatgcccgtcatactgaccagcgacaccggggatactaacagttatatttctagataataattttgtcctctttgggttagataaactaccccgtctgttagtacggacagcctttcatttatttttgtgtttgccccccagcagagcatgtcaggctaaaatagcgattgaaacgttaaccaacagctaacgaatttgaagccatagcgtattagcttctttctccagttttatcccccgccgagaccacccccaaagaaccacctcccagataggggggcgttttgcctaatttttagcgagctttccccaggccttgttctccatttcctatcaacgaggtctccgacattctttgggtggcaaggagtaaccatctccattcgggtcagttagataccagtaagctacggtagttacatcatctcggcgttcgaataggtgatctccccggtctcctatttgctgtaaagttacctttagacgggtggaaaatctgatgggatctagcaggtgccatctatacatcccatgacctgtcggcatatctttagcatagggggaaactccgctgttatctcgatttatctgttgatgataccccaggtaagcagaattaaaatgaactgcctgaggatcttccggtccctcccattgatcccggaacccccatgcgcctcctacataatcttcgagaccagtaccaacaatggttgcaaaatctttatcatcatcaatatagaattttacttccccttctccataccaaaaccgttccaactgggtcagaaatacttgtgtccctacgtagcagccagtgccagtaatatttgctagaacatgatcttcccctaatgaatttgaaccgtttgtacgtctccattgagaatgtaagtagcaaatattgtcggggagcttgtcatttaaagaataatccacttgataaaagaatccgtcaagattttcttcatgttcgcttataatttcgatacgagcttcttttttgaatggcatttctaaataacaatttagccctcccgttggagccgaaaccattaccgcagaagagaaaattactgtttctccgaaaccacatccaaagaagtctccaatcggtacatcgatagctgccctaggagaggaatcccaagtaatacgcaaacgcaagttccttaacacgaaagggttctttgcagtacgagtgggcatagtaaaccacaagtggcgtatcacaccgggtccttcaattcttgcaatttcaacactttcccccgccgctatggaaatacacgggcttcctttccgcccttgcccaagcttggatgatgctcttccccctttcccgggcaaaccatttgggttctccgctgtgattgcacgagacaaagtgggtagatattgggtatacaaaggtaaattcattttctattccgtttcgtggattgttgtcatcacttaactgatcctgcagcgacaccgcgtgtcagtgttcgttgaaaaaaagcgaagaacattagcgttggcagcagggatagtaacgaagctgccgccatctgggtcacgtcaagtgtattttgacctttaagattagccaatgcgatgggcaaagtttgcgaatctggcccgactaacataatcatcgggattagaaactcgttccatgtccacacaaagaaaaacaccattaaaaccgccaacgatggtctcattatgggatacaccacgctaacgagaacacgaaagcgtcccgccccatccacttgtgccgcctctaatacttctcttggaaaagtagacataacagacgctaggagatacgtccccatcgctgcttgcaaaatcgaaaatattattattaccgaccaaactgaattatgtagaccgatcccctgtgcaccgtagaataacggatagagcaacgcctcttgcggaagcattgttgctattaataatacaaagattaatccggttcttccttttatacggccgacacccaacgcatatgctgaaaatagtgaaattacagtccctaccagggcagtaacaccagcaattagtacagagttccaaagcagccgaggaaaattaacggcacctagatacctattaaatgcagctgttgtccaattttctggaaaggcaatcggaccattaatcgaatagtcagccggatctttaaatgaattaataacaaccaagtacaacggtgccagcatcaacatagctaccagaaacactagaagtaatacacagtattttattaccgcgtggcgaacactcgaagctgaactacgctccattttttctttttttaaaacaggtatttttttcattacatacctacccctcttcaatcgctgtggattgccagtagacaagcccaccggcgataacaaagatggttagtgctaaaactgtagctgacgcggcaccataccccactctcgaaagttcgaagaaattcctatacgaaaagaacgaggggacgtacgttgataactcaggtccaccccgagttaataccattacaggcgcaaataacttcattgcccctatagttgcagttaagacgaccacaaagatatcagctctaatatttggaatggtgatgtgttgaaagcgcttccaccacccagcaccatccaactgagcagcttcatataatgaaggctccacccgctgcagtccggacataaatataactaccggataaccaatttgtagccatatcatcattagcattatcgagtaaagcgctaaatctgtacttcctaaccagtctggcaatacatcaattccgacgttacgcaatatttgattaagcgctccatctcgggtatttagaatccaactccaaagaactccagctacagctacaggcaaaatttgcggaacgtaataagttgcgcgtaaaaatgatgcgattgttccattaaaattgcgcccgataaaatcaaataacgcagaagctaaaattaatccaataatagtgggaataatagcaatagcaatcaccatataaatggtatttagaaatgaagaccaaaacaggttgtctctaagtaaattagaataattttccagtcccacccattccattttagcccgcccccctttccagctaaataagcttataaagacattagccgccaaggggattaacacaataacactaaatccaactaccattggtagcagataaagccaatacgctctccgctctctttttttccaattcataattcaccgatttatttaaaaagagaaagcaatatatttaaattacttattaccctcataataatctttcattccttttagaaatttcttgccactttgggctccagaggcaattgactgtaatcccgccatttggtaatccaaaagcccaggaacagggtaatctggataataggatagctggttttttgtctttagagtctgaaatgttttgttcatttctttcatccgctgatcttcaatcgtcgacggatcgacaatcactgggattcctcctagcttggcaatttcctcctgtacagattcgctcaaactcttcttgatccaagctctggcgcacgccttgttctttgcatctgtgggaatggcccacaaatgccccgaagcgccagcagtaagttttgagtcggggaatttaagcatgccccaattgaatggagcttcctcgtttatccgattgaacgaccaagtaccatttgccatgaacggcattttccctgcaagaaatgcccgctccatatcatcggcctttaaaccagctagctgcttacccaagtatcctttccgcaaccacttttcaagatgagcagtcccttcagcaaatgcgccgcccgtgatatccgagctacccgacataagaatgaagttgtcaatctcttttctagaggcattttgagagacaagctgccaccaagtttgtagaactgcatgctcgccagcattcgacgacacgggagtaatcccatcggcaaggagtttatcaaacaccgattcaagctctttcatggtagaaggtatttcagtgacaccatgctccgccagcaaatctttgttgtagtagaaagtaaagtagctggctgtagaaggaacaccataccaatcacccccaccagctctaccttcatcgtcatatttggctaaggctgccactgcccccgtaatctctttatcccagtggttctttttcacaagttcattcacaggctcaattaacccctgtgacgcaagctgcccagcatcggcgttaccggtatttacaagcacaacatcaggcacactcccacccgagagcaagaccttcgcattggagcgaaacgcctcgaaattcgtagttgcccattcgacgtcaagttccggattctcctttttaaattcgttaagccccttctgccaccccttgtactgagcggaagtggtcggctcatattggagtatgctgcatttgccagatagttttgccggatcattgccgctatcagcagatgcactactcgaatgcccgttcccacctgcacacgcgcttagactcatagcaagaaccaacattacgccaactgcgtttttgatttttgacatctttgtcctccttaattttgtaaagagtaggtatattcgaaacacccacggtaaggtaacgttacctcaaaacgcttcataaggcaagtagctgtcgccaggaagttaaaaaatgtcctctccatgcctgcgccaaggcttaacgctgcattcactaaacttaaaacatctgcaacactagccacgaaagcagtaataaagttccagaaaatcaccgctcatgctagaatagtgacctaatggttacaataaaagatgttgcaaaagctgcaaacgtgagccccatgacagcatctcgtgttgtcaatcgaacaggtaacgttaactcaaatatgcgttctcgtgtgttacgcgcagttgagcaactcggttatgtaccaaacttgtccgcatcaaaacttagagcttccaaaggcaaacattggactattgggttaatccttagagacgtttcgaatcctttttcagcagagctacatagatcaatagagaagtcacttcgagattccggctcgctgacccttacagcaagcaacgatgacaatcgcgaatacgcacgggaagtcgtaatgattatgcgtgcccaccaaatcgatggacttattattgctcccccaccaggtagccagtcatatctaacagcagcagctgaaactggattgcctattgtaatcgtggaccgcccctcagaatccgacctaattccttgtgttatttccgacaactacgagggcatgcgtcaggcgacccgccatcttgcatctttcggacaccgtcgtatcgcttatttaggtgacgagctttcagcgccaatgatcgctcgtagggatgggttctttgctggattggacgagatgcgtattgccagagatgaaacaatagtttttcttgatcaagtcaatcccaatcaagctaggaacactgtttcatctttactaaaatccccgaatcctccttcagcctttttaggctctcgaaatcggataaatgtagccattctccaggcgttacgagagcatggtcaggaaaaacaaattgccatgatcggattcgacgatgtagaactggcagctgagctaagtccaggcatgaccgctattgctcaaaatccggcgttgattgggcaaatagcaactggcatattgattgaaatgattgaaaacaatcacatagacggccaaacggtggtagtgtccacccgtctaatcccgcgcggctccggagaaatctcatgttcctcccaatatgtcgactaagtgattaatccttcatattctatatccgttagaactatcgcccccccccggtagggcgcgttttgccttagcgtatgcgtgtccccccccctgctcggcacgccaaagagtcactccaatcacctggcgtgtcttctggataaactctggcaccacctattaggtaggcagtttccaatccggccgtccctgatcagtaactgcgaaagtccaaaaaagaggaaaccacaagaggaatcaaatccggggcgctcgaaataaaacccctagagaacgagagactgcagtctccacagcgccaggctatcgcctgcaccaagttgctaaaatcccggacaaataccctcttacaacgaaagacccaccaggtgtccgacggcgccggtaatcagcatggcgagggcgccgccgataatcaccctaatgacggcacgtcctcggggagcttccgaaagccaagctgaggtgtaacccgccaaacctagcgccaccagcgtcaaaatgaaggtggcgacaaacttggaggccggcgggaacagcaagatggccagcatcggcaagaccgcgcctaagacaaaggaaatcgccgaagaaaatgcggcgttccaggggttaacaaactcttgcgaatcaatcgagtaacgcgcctctacctgtgccgccactggatcaatcgcagagtattcttttgccactaaccgggcagtttccagcgagagccctttgccctcgtaaaccttaatcagacccgcaaactcgccctcgggatctttcctcagccgactcttttctttatgaaccagcgctttctccgtatccttttgggtagatacggatacatattcgcctgccgccatagaaatagctcccgcgaccactgccgccatcccggcggtaaagatcgcaatattattttgcggatcagcggcggccaccccgaccaccacgcccgcggtagaaacgatgccgtcgttagctcccagcaccccggcacgtaaccaattaagtttggaggccgtctttacgctctcgtcggtatgctcgtctcgctcgcgcgtaccggaagaagtacctagtattctctcccctaccaaactcatttggcacctccacttaccagtacgttttagctgcttaacgttttttctgacttcaaggtcagattagcaagacaaaaatttttgcgagctaaaaaacgggattacgcgtccagtaacaggcaaacccaagcggaagagacctcatgtctaagggaaggcgagccaaaggaaaaattctaggattcttgcctcgcgccctcggaaattgaacgaggaaatcgcccggcggggtcaatcccctacatcaacgcgcgtaacatcctagccctgtccaaaaacagattccctcccccatctacggaggcaaagtagggctaaccttagttaaaatttgcgtcagctaaccaaataaaacccggtctaaccggcacaaataccgccaactaaccctcaaaattacctaattaacaaaagggctatcttgcgtaaatagttcccctgttatgacacctgaggtctcagacagagcaacgccgctgaaagcttaaaacagaaactgccgtgcagaaactgccctatgcttcccaattctccaggaaagcgcgaaccgcggcagcgccgcgataagaggcttgcgccccgaccttggtggtagccagggaagaaactgcggcagccaggcaagctccatccgctaatgaacaccccgccgccagcgccgacaacaaagaccccatgaaggaatctcccgctccggtggtatctaccgtctcaactgggaaaatcgggatccgggtggcctcaccattatctagtacaagcgagccatcaccccccaaagtcaacaccacctgtttcattcctaaagaatcggccgcttcccgcaactggttaaggtcttcaacatctagttcgcggccacttaataccgccagttcgtgttgattaacgatcaacacatcaaccagtttcaatagggaatctgaaacctgagttataggcgaaaagttcagtaccacctttacacctgcctggtgagcaatccgcgccgcttcctcaaccgcatctagaggagcttctagacacaaacccaaggtcttcgccgaggtaataacttcgctttcttcccgaactaattccgcatttaccagcgcatttgtccccgcagaataaacgatagtgttctctccggccgcatccactgtaatcaaggttgatcccgatgcaccctcgcaacgcttcaccccggtagtgtctactcccgcgctgttaagggaagccattaagaggtcgccatgcccgtcatcgccaacggctccaataatcttagttttcgcacctaaaagggcgcaggtaaccgcttgattagcggatttacctccaggaagggtcaccaatggaccaccgataaccgtttcaccaggacctgggagtcgctcagtttctatggtcaaatcagcattaattgaccccactacggtaacgggcgcccctaaagcatccagcactcgctgcgcggttgtcactatctctttcatctgcttcatgtttcctcacaaatactaaaattttatttcgctagctcggattgactactgtacccgcattttgcggtaaccgattcgcgttaatatcttgcgcactcgattctgagtacgctcaggagtagccgaaactcgttgagggaacgcgtgaccattaaggcattcacgtccaattttttggcgattttcctaataacggtcatcgcgttccctcattcaatgtttctactgtccctagctggcgtctgcgggttgtccggctgctttcggaattaggaacgaggttcccaatgccaacagcagcagtacagcgcccgtgataatcgcgccgagatgcccgccgtagcctccacctaaagaagtcatcaccgcatagagcaccgcgaaggaaataccggctcccaggttgaaagcacctgcgttaagccccggcaggtagccgggattgtcggagggtgaaagcacaatcccgagaccgttaagcatgatgttaaccgtaccggcataggttagacctgcgaggatagacaccagtagcaacacccaggctgcggcgccgttcatggtaaacatcaagattgccagggagattagcgcaccgatcaggccgtaacgcagaactctacgatacccgaagcgacctgcgagggtaccagcaacaggccccatcactagaccggcaagcgcgtagggcgtgagcgtccagaaggaaaccacgtccgcccctaaccccgcaccaaacttggtgtcttgggcaatggaaggcacaatcccgttcatgattgcaaaaataccggtcatggtgagtaccgtggtcagtagtaacgcccaggtactgcgcgaactcagatagtggcgggtgaccagaggatgttcggtattgccttcttgacgccagaacagcatgaagaaaatagccgcagctattattaacccgattaccaccagccagttagcattctgcagtttcgcaatctcattaatggcgattagggcggatcccactgctactaccagatagaacgtgccgagccagtccatcggttgcggctgatcaacagtagattcatcagtgagaaaacggacagcaaacgcggcaattaccgcaattaccgccatcgtccagaacacggaatcaaaaccaaaattctgagctaaccagccgccagcgatagcgtcaacaccggcgataccaccattaatggcggtaataacccccatcaaggtgccataacgtttaggatctggcaccgccacccgcaacatgattagacacaggggaacggtcggtccggccacgccttgaatggtgcgcccgataaacaatagggcgactgaaccggtaactcccgcaagagcagagattacgcagcccacagcggtcagtaccatcatgctagttagtagtttgcgcctgccgatcatgtcgcccagccgcggcaggaatagactaaacagcgccgccgccgtaaagaacacggtttgggttagtccaatcattgccgcagtggtgttaagttctttttccatcaacaccagtgccggtgacagcatggaagcgtttagctggaaagcgaaacaggctacaagtagggcggtcattaccgcgcctacggaacgaactttactcattagcagttacccttctgcacgcggtcgatagcatcgataaccaaatcccagaaaccctcaaagtccagtttggtggcggccttcgtgtgacagtcttctccggcaggttctctaaagtccgcgacagtcatcccatccgtgagggcgccgcgtagctcaatatccagcggtacccgcacagtttcgacaattgctgggtcgattagataggcaatggtacaaggatcgtgtactggcgggaagtcgaaaccttgcgaatctttgtaagccttacggaagaatacgaacagatctagcacgaactgggcaaccggaccgccaagcttctggattttagcggtgatttcgtcagtagccagggcttggtgggttaaatctaatcccaccatcactacttcccaaggctcattaaagacgatatgggcggcctcgggatcgactttgatattaaactcggcaactgccgaccagttccccacatggtatcccccgcccatcagcactacttcgcgtactcgttctacgatgcgcggttccttgcgcactgccatcgcgatattggtgagcggcccggtaggtaccagcgtgatttccccgggttcatggctcataatagtgtcgataatcaggtcaatcgcgtgctgatttaccagtggttgcggttcaggcaaatctactccgtcaagtccggattcaccgtgttgaccgggagcgacctcaacctcacgtaccagaggacgatcacatccagccgcgattggtaccccctccattccgaaaacagtagctatccgctgagcattgttagttaccttcttcagcgtctggttaccaccgacagtagtgacagccagcaattcgatttcggggttggcatgtgccagcaacatggcaatagcgtcgtcatgcccggggtcacagtcgaggataatttttcgcgacatcttcgtctcctttgcgcgattcaataatcttttcgcaaatgtttgcgtaacttgaaactagcacaaagacgcaggaagcacggggttttcagcagaactttacagttttgaaaatgtttacgtaaacatgtcatgcaagttatcctcacagaaaaatccttaagcttttctccgcgcgggacacgcgaataaaagatactcttagagaccgcgttagcgcaggtagcgatgcacagaaatagatatagcaagctgaggatgcgtaagaacgctgctcagtagctaagtcggcgcgggcagcgattttatccgagtgggcgcggtgggcataagaaatccggaaaacgtcgctacgttttccggatttcttgggcgggaggaaaaatcgctgcccgcgctttgatggaaaaaataaaacctactgactagcccttgtgtacctcgtcgcgggtgcgcttattttcctcatctggatgccccattcctgcactgggattaaaccaagtccaggctaggaacaccagagcagtaacgaacaacgccacgccggaatacatattggcattgatcggggtgttattaatgtcctccagattatttgccacatagtccggaaccgtggctggttcaatcaccaaaccgcaaataatcaggaacaatccgataatgccaagcaccaggccgcagataacgcgaatatcgtaaatgtgaatctttcgtttcatttctttaacctccccctagtggaacaccgagtttagaatcagcaccaagacacctgccacaatcgccagcggaatcgggcgacgcagcagcggcaactcgtgcaacttcggatcaacacgactctctttcggcgtaagcgaccagacgaacccttccagttcgcggtaatccttcggcttggtaaagagggaaaccaccacatttaccagcacacctactacgaaggccgcgcccgcagcaatgaacgcttggccttggccgggcagctctaaaatcttgttccagcacaaaacgttgacaaacagtgccgccaacgtaccaaacaacagacccgtccagccgccggagggcgtcgcccgtttccacagcataccgataatgaacgaggcaaacagcggggcgttaaacatcgagaacaactgctgcagcaagtccataatgttggggtacagcgaagcaatcaacgccgtaaataccgcaacggtacaggccacgatggtagcgttgcgtcctaccttcaaatagtgctcatcggattcattcggcttgaaataggcctcgtaaatatcgaccgtaaacacggtgttaaaagcagaaacgttagcggccatacctgccatgaaggaagccaacagcccggcaatcgccaaacctagcaaaccattaggcaacaaatcccgcatcatcagcaacatcgcatcgttatagctaacctgatagcctgccggcacgtgcgaggataggttcgcgagcgcttcctcgccgacccccatatatttcggtccggctttaagccgcacgatttcaggaatcaaaacccctgctaccatacctggaataatcaccaggaagggaataaacattttcacgaaagtcccgataatcggggttttctgtgcggcagcgatagagtcagacgccatcgcccgctgaacttccacaaagttggtagtccagtaaccgaaagccagcacgaaaccaagccccataaccaaaccaaacaccgacattaccggcgagttaaacccggacagcaaagttcccggccaagaatgcagctggttattagcatcctggtagacaggattggttgcctcgcctgcccacttggtaatcttttcagttagtccctgatatccgcctacacggtaaagaccaatcaaagttaccggcagcagcgcggcaacaatcacgaagaactgcagcacctcattgtagatagcagcggctagaccaccaatactgatgtaggtgagcacgattaacgcggcgataatcagcgaaatccatagcgggattcctagcattccgttaacgattttacccagtaggtacaggtttaccccggcgattagcagctgggcgagggcgaaggaaagcccgttgatcaggtgcgcggcagtcccgtaacgtttgagcataaactctggtactgaacgtacctttgatccgtaataaaacggcatcattactacacctaggaacagcatcgcgggaatcgcgcctacccagaaatagtggaaagtgggcagaccatattgggcaccgttggcgctcatacccataatctcaacggcacctaggttggcagacacgaatgccaggccggttacccaggccggcaaagagcgcccaccggtcaagaattcgtcagacgagctggctttccgcttcatcatgaaccctacggccactacgaacgcaaagtacacaatgatgggaaaatagtcgtaaaacttgggctcaatcagggtggttacctcattgggcattagtaatatcgggtggctcattccctcccccttttgaatttaggactccattatccccgcccagcttaaggtggtttccgagagagggaaaccgcccgaggtcttgacggttaaaagacactataatgtgacagattgtcctacaaagtaagttttacctaattttttccaatatttttagccgttaaccttaacttttaactcaaatttgcaacctctatactcgctttcgttctttatttttcctctcctctcttttgctgccctctaatttttaatcccctagtactggtcgtattcttttcatgtatttcatcaaggagattgcccagtaatgacaactgaatcgaaaacagcagtaaaagaactaactattcgcggagtgattatcgggggaatcatcaccttagttttcacggccgcgaatgtttatttagggctaaaagtgggactgacttttgccacctcgattccggcggcagttatttccatggcgatcctacggtacttcaaagatcatactgtccaagaaaataacatcgtacagaccattgcttcggcagccggcacgttatcggcaatcattttcgtgctaccgggcctaatcatggtgggctggtggaccggcttcccttattggacgaccgctgccctgtgtgcactaggcggcatcttgggggttacctactctatccccttacgacgcgccctcgtaaccggttctgacctcgcttttcccgagggggtagctgccgcagaagtcttaaaagtaggcgacaccagtgaaggcgccgccgataatcgccgcggcctacacgtgattgtttggggagcgattacctcggccttcttttccctgctcaccaacctaaaaatcgcgctctccagcgtgaccaccgctttcaaagttggagctgggggaaccatggtaggtaccagcctttccttggcgctcatcggaatcggtcacctggtcggtctgggcgtgggcatcgccatggtgtgcggaatggtcatcagttacggggtgctgctcccctacttttcttccggtcagctgggcagtggagattttgccgagggcgtgcaaggaatttttgcctctgatgtgcgtttcgtaggcgccgggacaatcgccgtcgccgctatttggactttcctgaaaataatcggtccagttatccggggaatgcgcgaatctctggctgcatcccgtagacgtaaatcgggggtggaagtacccgcgcaagagcgtgacctttcccccgcctgggtcgtaggtatcaccttagctttgatgcttcccattggggtactgctctggttgttcctaaagggcactccgttggaacaccacaccagtggactgattttcctatctatcctgttcattttggctctcgggttagcggtcgccagcgtctgcggttatatggcgggactaattggagcctctaacagtccggtttctggagtgggaatcctagtcgcaattttgaccgctctagtgatcaaagcggttgttcccgctggtagtaaccctaagaccctagtggcttataccttatttacggcggctatcatcttcggtatcgccactatttctaatgacaacctccaagatctaaaaaccgggcaattagtgaagtccaccccttggaaacaacaggtagcgttaattatcggggtgatttttggctccctagtcattcctccggtgctgcatttgatgaataatgcttttggtttccaaggagcacccggtgccggtaagaatgcgctggccgctccgcaagcctccctaattgcagagctaaccaagggggtattcgggggcgatattgactggagcctgctaggactcggagcgttgatcggggtggccatcatcttgattgatgagattctaaagcgcaccacttcccgttactcgctgcctccgattgcagtgggaatgggaatgtacctgcctattaccctgactattctgattccgattggtgctacctgcggggttctctttaaccgttgggcgaaaactcggaagaatccggaggccgcctcccggatgggaactttgctcgccaccggtttgatcgtaggcgaaagcctgtggggagtggtttatgccgcgattgtgggcactaccggcagtgaggagcctctggctattgtgcctgattcctggtcgggaatgtcctccctattggggctagttatcttcgttgctttagccgcctggggataccgccgcgcaaagcaacaggccgaggcttaaaatcaatcaaattgatgacgctagaggagaatcaaatccctctttacccgcacgcaactgactgacgttggtgcgcggaggattggtttttcctcccgcccaagaattcggaaaaagaccgcaggcattttccgaattcttatgcccaccgcacccactcggataaaaccaatcccccgcgcggcctaaagccagcgaccagggaactgcactacgctggcctgcggctccaccagcttcaccaggtcacgatgttctattcccgcatccaggtacgggtcgcgggaagtaactagccggtaaccaagcttttgatagaacccgataactggcacttgggctgcgatttgtagtagcagcgtcccgccaccctcggaattcgcccagctgctaagcgctaaacgttcggcgccgagtaccagttctttaccgttaccgcacccgcgggctgcgggaagtacggcgaaacgtcctaaattcccggttatagtgtcccgcggtaactgaggaaacatttctgcgaggtcggcgggaatcccgattttcggtggggtaatccgtccggcagcgatagtgccggaggcatcttcacctaaaaggtggatggttcccttagcaaagtcgatatcgtctatttctaggtcaagggagattccttgttccaggtggaaaaccgcgaggcgggttgcaaaaatatcgagaatatcgcccgcgctttcagctcggcggacttgcatagcggtgctcatacttttaaggatatttattttttgtttctaggggagacttccgaggggaacttccaaataaatagcgcttagccctggcggtaactaacgcccatcatggagcgcgggtaatgccaccgcagcactccggggggagctacagccaggcaggttccgcattccaggcaggccgcatattcgatatccactgagccgtcctcgcgagcggtatagacatgagcaggacaaacgagttctaaaagttttccggcacccgtggctttcgcaagttcttggtcgatagctatatgggattcttcttcgtctacctcgtaaatattggcggtaagtctctcagatacgctttcgggaagatattcagtcatcttaaatcgacctcactgcttgtaaaccgagcttcactaggcgacggacacttagtggcgatttctttagcgccgccttagccaccggtaataggcgttttcgcggagtggtgtccaggttatagatcccgtggagggtatcggccgcgagctcacctacctggccatacagttcctgattatgtaggaactgcggagagcgcgcgaaagtttccatatctttgcccacgaaagacgcctggtagttttctagatatttacttaacgaggacgcgctaaagttttccgctttgagcgcggtatcaatggcgctggcagcagcttgggcagatccggccgccaaatccattccccgaatcgtaaacccggtgttgagggtaaacccggcggcgtcccctatcaacaccagcccatcgtgaaccagcccgtgctgcatagtttttccgccctcggctaccaggtgacagccatattcgagcaactttcctccctgtaagaacggctcgataaagggatggtttaataaatgatcatgcagttcagaagaggataactgttttttcttcaggtcgtctagcatcgccacaatcccgacagaaaccgagtcccggttggtgtacaggaaaccgccgccagctaccccctgggtgcaatcccccaccatctggtaggcggcgccctcaccttcctgcagattgaaacgttctttaactgtttcttcgcccaaatggataacggattttacccccacccccaggtgaccaaggggttcttgggggcggctcccggcgtattgcgccaggaaggagttcaccccgtcagctgccacgattactttgccgtaaacggtgtcttctccggcgcgcactccgcaaaacttcccgtcctcgcgcactaattcatcgactttcatgcccggcatgatggtggcaccggcctcttctgcctgctcggccagccaaggatccagtttggcgcgcaaaacactcacggcgttcactggttttgctaggcgctgatcccaatactccagattgaccgcagatttcgggtttaggaacgacaaaatgttcttggtgattttccgttcaaggggcgctttttcaataaagcccggaaaaatctggttcattacctggcagtaaaacaccccgcccgaaaggttcttagcccccacttccgagccacgctcaatcaataagacctggtgaccctcttttgctaataggtaggcacataccgtcccggcgacgccgcctcctacgataatgacatcgaaatcgtattccacgctcatgttttatctagctgcctccactgggcggattacctgcttcagaatctctaccttatcgcagttcgcagcgggcaataatgaggcgggcgcgatacccgttagactttcctcagaggttaggagggcgatgagcgggcagcaggcagctagcgaacagcatcagcaggctaagcgacgcgaaaaaccgcacgcgcaaagcaaccgtcctgcccgcaaccgcccgaaagccttaaataatgcgcctgctactatctcctaccccgaggaacttccggttagtgcgcggcggcaagaaatcgccgaagccatcgccaacaaccaagtgatagtggtttcgggggaaactggatccgggaaaactacgcagctgccaaaaatttgtttagagctaggcagaggacgcggcgccctaatcggacacacgcagccgcgccggatagctgcccgctcagtggctacccggatagcccacgagctgggagaaaacctaggaaaaaccatcgggttccaagtgcgatttactgacgtggtctccagcaaaaccatggtcaagttgatgacggacgggattttactagcagaaatccgcaccgatcccctgctgaaacgctatgacactatcatcgtggatgaagcccacgaacgctccctcaatattgatttcattttggggtatttggcacgcttgctgccccgccgccccgatctgaaagtgattattacctcggcaactattgattcccggcgctttgccgagcatttttcccgccccggttccccagtcccgattatcgaggtatctgggcgcacctacccggttcaggtacgctaccgccccctagatggctccgatggccggaatgaggacgcagagggcggtgaggaatccttcgaagaaaaccgtaagcacttccctcaccagcaaaaagagggcgtcgcccgcggggaactaaaagatcaaaccgaggggatctgccaggcagttgatgaactctttgcttgcggtcccggcgatattttggtgtttttgccaggcgagcgggatattcgggacaccgaggccgccctcgccgcgcatctaggtcagaggtacgtgcgcgccggggagcgctcaaacaccccgggcgcagtagaaatcttgccgctatttgcccggctatccccggcagaacagcaacgagtcttcgctccgcatccttatccgcggatcgtgctggccaccaatgtggcggaaacttcgctaaccgtaccgggcataaaatatgtgatcgatcccggtctggcccggatttctcgttattcccagcgcaccaaagtgcagcgcttgccgattgaagaagtttcccaagcgagcgcccgccaacgggcggggcgttgtgggcggattagcgacgggatttgtatccgcctgtattcggaagaaaatttcctggagcgtccccgttttactgaacccgaaattttgcgcacctccttggcggcagttattttggcgatggcctcgttaaacctggggaaagtggcagatttcccctttatcgatgccccggatcctaggcaagtccgtgacggggaacagctgctttacgaactgggtaccctttcggagcggagcgaaaacgccgagggctaccgcctcaccaagctggggaaacgcctagcgaagctgccgattgatccccgtctggcccggatgctgctagaggccgaccggcgcggatgcgtatcggaggcactagtaatagtttcggcgctttcaatgcaagatgtgcgcctgcgccctctagaacaccaggaagctgccgaccaagcccattcgcgatttctggattccagttccgatttcctgacctacctgaatctttggcgctacctgcgcacccaatcccgcgatctatccggaagcgccttccggaaaatgtgtcagcgcgaatttctacattatttgcgcactcgggaatggcaagatcttactaaccaactgcggcaactactcaaagaactgggaatcagcgtacgccccttggcgaagccctcccgctcgacctatcagccagatccgcagtcttgcgaactgattgcggcctgcaaaaacctcacctctaaatattctgacacggaagctattcatcggtccctgctggtagggatgctttcggggattgggaactgggatcagcgcgccaaacagtacctagcgccgcggggcgcccgcttcaccatttggccaggttcggggctctctaaccgcacattcgattgggtaatggctgcggaactggtagaaacctcccggctgtttgcccgcaatgtggcccgggttaaccccgattggattattcatgccggaaaacacctggtcaaacgctcctatggggagccgtattggtcaagtaggaaaggcacggcgctagttccggaacgggttaccctttacgggctcactattgccgcggacgtgccagttcctctgtcccggctgggaaataaagcgatgcccgcgctatcgcctgcggcaaataagttggatcttcctggcgagcagaccccgcaaactgcccgggagtgggcacgcgccctctttattgctaatgccctggtaagaggggacgcccccttgaattatcccttcttaaaacgtaatgaaaagatgctggagcgtgctcgggaagttgagcagcgcactcgacaggcggggatggtggccggagaggacgccttggcggctttctttgcgcagcgactaggcaaagaggtaaccaatccgggaactttcgcggcctggtttaaacgtcaagatgacccccatattttggattaccccgaggacgtggtgctcacccccgctgccacctcaaaagcgccccgcaactattccagtggacaagccgcagatcattcgattgggggcagaactgatttggccggcaaacttacccggctgtctcgcgccgggttccccgaccgctggataggggcagattttagtttgcccctgcagtatcactttgcgcccggcaaggaagaagatgggattacctgccaggttagcttggagcagttgccctatctggatccgcaagagtttcaatggacagtcccgggcctgtggccgcagcttttcaccgcgttgatccgggcgctaccgaaaacggtgcgccgccagttagttcctgccccgcaggtggctgcagaagtcagcgcgtggatagagcgcgaactggccaatcccgcggctgctactggtgcttccgaaagccgcgagcctaccccggtacagattaagcaagaggaagcgttgcaggcgtctctcggacgtttagcggcttgggcggggattgaaaaaagtaataataataatgagcctaccagtgaaaatcagcctaaagttccgggaaatgaaggcagcgcgaagaacgcaaatccagacccctcggaaagcacagaacaggaagaaaacggggacttatcgaggacaggcactccccaagccactgcacccgcagcggcggacacctctaaacatcctgaccatcgcaacctaacggaagtttcgcctaagaagaagcaaaccgccccctcgcgcccgctggctcaacttttcatcgcagctctcgaccaactgcgcgcggtagaggtaaccgagcaagatttttctcaggcggtcagggccttgcctgcgcatttgcggattcgctttgcgctgcgggtgggaaaggaacagatctattctcgcgaccttggaaaactgcaaaaacgttacggaaagaaagggcgcgccgctcgcaagcaagtaatccgagacgcactttcgcaggtgagcaaagccgaaagcggaaagaaaaaccccaatcgttgcaaaccgtccccaggcagcggcgaagctaataaagccgacgaacagcgtttcccggaaacagatttttctccttcctggccgcaaatacgcgggaaaacagcagttttacctgcgcaaacaaccactactgctggcggggtacctggagaagccttcccgggcttactaccacagcgcctgccgcggcctttcggattatcactactgtctggctcgcaaaaaaaccgctacgaaaacccgcgttccacccataaaaacagcacaaacagcaatcagcagaatccaagctcccccgttttcccagtacgagtagcccgctttgaaaacttgcagcaggctcaacgctgccaccactttggggttacctgcttgctttgcgcccagctttacctacctcctgcccggatctctacccgctggccagcacatttagcgctgaacctggcggcattaccctacgaaaaggccgctttacttgcagatctgcagctggtaaccacctggcgttgcctagcccaagcaaaagtcgatacctggacagttcgggattcttcgactttgcaacagctagctaaagaattccgtgaccgtttcgaggacgaggtttacgccctcgcccgcgaaattggggaagttggtgccgactaccgggaggtatcagccgccctctcccagcatttcccactcagtgctttaggggaagtgacccaggtgcgctcccaactctcgcaactgatctacccaggtttcctatgggatttatgcgagggagccgaagatttagggcggtacctgcaggccatagctacccgcctacaaaaggcgagccagggacaaaataaggggcaccaccaggaagaacaagctttagctatctgggaaggcgcgcgcgaaaagctggaaaaccgagaaaatctagccgcagctccatctgccgtaactgccctactccacgggcgctggctagtggaagaactacgagtttcgctatttgcccaacccttgggtacgcgggagcgggtttcgctgcagcgactaagcaaacttctaaaagacccgacgccctagctttacttttcttttaggatttcaatacgttctaaaagaactccccccagcgccaaaataaccccggtttctacccggaacaggatttggattaaagtacccaagcccggcagcactgtatgcagcaccggattatagttataagcattagggatactggcaacccaagggccaataagcggggcaaaaagaccgccgacaaacaccacgatccccagcacaatcaaggttcttccccgaatggcacaaaagttatctagcacaatttcaccaatcctttaagccggctcggcaatagctttacttaactatcgttattttactgagctacactacctaaagcaatagtaaaataaccgccgcgaccagggtaattagggcgccgacacctaagccgatcgccactccgcctacgatttctttagctgcgccccgccggcgagcaggcgcgtcttggcggggagaagcactcgatgggctctcggcaaaaccgggactgttttcccaggcgcctaaagtttgctcgtttgcggactcctcctgctcccctggtggcgagaatcccccaggagacccaccgaccccgatagcctcctcggtattaaccataattgctggtggtaaagctaccggacgccagacaggagccgccggttcaacctgcccgcgagcggtctgccccgactgggtttcggcctcatcgtgggcaggaataatcggtttcgccgacgccaaggaagtcttagcgtctgctggggaaaccttcaccacatcctccagcggttgcgggggcgggggctcctttaatactggcagagcatcgagggggcgcacctggtcaactactgactttaagagggcgtgggtctgggcagcgctggggcgcaccgaagtctctttcgccagcatttgggtaatcacattccacagggagccaggaattccgggaagcattcccggcatatcgtagaactgatgctccaacacttcccctaccgagcctctaaaaggggtgattccgcagagtaactcgtaaaggatcactcccagggaataaatatcggttttagaactgactcctttgccttcaatcatttcgggagccatatagtagggagttcccgagcgtttcgtggtttggatttcgtagcggggatcaatccacctggctaagccaaaatccgcgatttttggcaccaggtagttaccttgccgtttcaacaaaatattggagggcttcaaatcgcgatgtacaatcccggcgtgatgaatcggggaaagaccagcggcaatccccatgcaatagtagacggcgtctaaaggcagcagcgttccccgcttttttagtagctcccccaaatccccgccatcggtatattccataatgattgccatatattccggagtttgcaccagatcataaacttccacaatgttttggtggcgcaccccggtaaccaggtctttctccatccgaaaacgctgcgcaatcccgggttttaccgccaacttcgaacgtaaaatcttagcggcatacaggtttccccgcgaatcagcgaccttccacacttcccccatggtgcccgaacctagggctttgagcagacgataaccggcgatataaaacggggtttgctggggtgcgggagctccctggctaactaccggcatttggggggatctatagccggcaccatggcccaaactttgcggaacttggtcaggataatcaggaaactcagccaccacttatctcctcgaccttgatagaggaaccgcagttagcgcggcaaatacgccgtagaatcccactaaaatcagcaggttaacaccccaccgacctgtagacggtttccatcgctgatgtttttccggaatagtgatgggctctggtttttttaagctttcagctttaggaggagcctgtcccaaggcctcagcctgttgtttggcgtcttcattacgttggtcaatcttcgccttgttttcctcataggttttatcctgttttttctgcgcatccagagctgattgccggcgcactcgatccaaatcaactgaggccgcaccggccgaataagcccattgggaagaaaccgtagaagataacaggtgtcccgcactggaatcctcaaaatcgattactcccccacacatcaccaactgcaccatgagcagcacaatcattactggagtggtctgttctgcgctgcgtaccaaagcagaaaagaatagccctaaagaggacgccgccaaagttgccagcaaacaggcaaggaacagctcccaacggaaaggcagggcaaccccgtctttaggaatccgattcagtaatgttattaccaccgtaagaattcccgcctgcaccactgccgatagccccaggctaatgatttttgatagcagataggcgcctaaacgcaatcccaccgcggattctcggagaaaaatagcgcgctcgcgcaccagctccctaatcgcgggaaccagccccatcagtaccgccccgaaaatcacgatgacgagcaacattcccggtgatttaatcccctcggtatcggtgctacccacgaacccggctttaccgggaaccactagggacaataccgccattactagcggcagcgccaccgtaaaaatcactaccagaggatcggccatcatcagtcgcatttggcgagaaaacaaggtgcgactttgccttaacaaagaatgcttcttcggttggatcagttgtttttgcgccggagccgccctactgcccgcactaacccccgtgaggcttagcgacctctttatatcctggagattcacccgtcccgaggaggcgaacatagcttgcatctggtcaggagcccgcgaaagtaaatcatagatttccggaaaatctttcacccccaagggggcaaaaaaccctttaattcccgctggcggaccaaagtaagccactttccccccgggagccagcaggagcacattatccgccatatgcagattggcagttgaatgggtaataactaccacggtgcgccctggttgtccgttttgaccgtgcgcgagtttagctaaaagcgccatgacttctcgatccagattaggatccagtcccgaagtgggctcatccaggaacaacaaatcgggttcatctaaaagttccattgcggtagatacccgtttacgttgccctcccgacattcgttttactttcgtatcggcatgggcttgcaggtcgagctgattgatgactctctgcaccgctgcttttcgtactgtggcgggagtgtcatccgggaaacggagcttggccgcataatctaagacttttcgccccgtcagatccagatgcaataaatcatcttggggaactgcagaaatccggtcagaaagcgcggaggcatattggctcatctccaggccttcaaaataggtggcgcccttttgtggtttgagcttgcccatcatgcagttaagaagggtagatttccctgctcccgaagggccgattaccgccaacaaagaatccttaggaaccgcaaaagatacccggtctaaaatagcctttttcgaccccgcgcccttttgccgttctgatccactggttcctaccaggaaagacatatcgtccacgattagcgcttcgtgagtttgcccttcagcaactatcgatccgattctaaccagattatttcccactaaacgcagagaaatcctccccacagttagtacatcgcccggttgtatttgagcggcgcgtactcgcagaccgttgataaaaactccgttagttgaccccaggtcggtcaccgttaatttgccgtagttaatagccagcaccgcatgccgggaagaaaccatcgggtctggtagtaccacttcgttttcaggatcacgcccgatatggaaaatctgtccgggagcaggaatcggaatctggttaccagctcccacgatttctcggttatcggttctgcccaaattagcgggaagtttaggtggggcgggacggggcggttttttgccgatacccaaggttgtccacccagtaggaaccaacatgtcggaacgagacgccattttaggagaggcggcgctgaccgccgtttgcggaatttttactggctgcgaggcaggaattttttctacccctttgggagccgctgcccggggaggcagtgcggaggtcggcggcaaagctgccgcgggagaaccggctgtttttagctcctggttaattagtttctcttgataggtaatagtcggggcagaaggttgttttcccagacgaacctgccccacgccctccatctcatatgccctgccgggatgcagccgctgccccgcaacatagagcccgttagttgaatttaggtctgtaagtgtaaagcgtccattctggtaagaaattttggcgtgtcgtcgcgacactactgggtcgttgagcgataggtctgcggatctatcccgacctatcaccgcgctctgcccacgagaaagagtcagctctttccccccgcactgcaccagtagttgcttacccatacgccttctttggtgaaatcttaaacttgaatgcttttagtttacggtcttaggtgtccaaaagttacattcgggttatatcggtcaaattccgcgccggattttacgcagttcccgcagataggcagggtggtgacgcggagtgcctccctgataggtccaagtaaaaatattttcgatatggaaatcacgggaacatttagaacaggctaaaacccgagtaggggtgcggaaacgctcaacgcggtgaccggctttgcatatcccaatccaaggggccggtagggagggcgcatccgaggcgactgtgcgctgggcgcgtcctcctagggcctttactgcctgttgccagcgtcgcccatgtcctgcccgcgaccctacctgggcgtgcgccacctcgtgtaaaaccacttcccgagcggcggcagcatcataaagcggcagcaggtagcgggaaaaactaatccgtttctccccaaaatggcaggctccggcacggcggcgagcatgatcgcagctcacttcccaatcttgcagcccgcaggcgtccagagtgcgacgcgccagctgtaatacctcgtccaagtcgcctactttcaataaatgcatttaaaaacataaactagggctgttccccctgaatcctagcggaggcaaactcataaatgacaacctcacctctagtgccgccagcggtgtccgcgcggcgcgaagttacccggcaaaaattattcgctgccgcccgggagctgttcgccaaagagggactaggcaaaaccggggtgaaacccctgtgcgaagccgccggtttttcccgcggagctttttactcaaacttccccgacttttctgagttcttgcgccaatacgtacacggcgagttcgcgcaggtttcggagcaactaactcgcgcgcaatccttgatcaaccaagatttagccaccgggagtgcctccgccgaaggtagttttttaactacccactggccgttgattagtaaaaccatctccaccactatgttgtttgagcgagatttcgtgctagtgctgaccgagctgcgggtgcatgcggcacgcaaccgggaatttttaccgtttttacgcaaagaaatactggtgctcgaagaacaactggcgcaaatcattaccggatgtctagacactctcggtttgcgcctgcgggtagaccccctagagtgcgcctttgtagtggtttccctctggcaagcagacctgataaaccgctcaggtggggtcgcttccggtcaagtagtgcgcccctccagtcacttcctagaagccgccctcccgcgctgcttagccgggatggtcgccagcgaagagtcctgacgctaaagactagtgacccagggtaccgggggtgaccggaggctgggttgaccaggggaaattaatccacttatcggtgtgcttaagtacgtagtcgggtttaataatcgaccgggactttacatagatacaggcgcttctagcttcagaaaccgttacccgttcgccgtcttgcccggagggaatcccgcgttcgcgaatcagccgcatcaccagttctaaagttttccccgagtcagccacgtcatctactaccagcacccgtttgcccgaaagtgctgacacatccatcaatgggggaatcagtaccggttccggcagggtttcttcaatatcggtgtagaactcgacgttcatagttccgattgctttgagccctagcgcgtaagacagcgcaccagcaggcagcaacccgccgcgagctactgccactaccagctcgggcatccacccggaatctgctatattctgcgctatttggcgagtggcatccccgaatccttgccaggtgagcacttcccgatcttgtgtatcagccataaaactagcctagctatttttagtgaactttttttgactgggaaagaggtttttcttttatctgctctccccaccgcctccacctggaaaaatagcgcgccctcgccctcaaaaatctgctgccagccgtaaacccctcccccttttgcttcctttgcactaagctgagtagccgtgcgctttttaaatggaatgtcagccccgtatgagctgacctatgacgatgtgtttatggttccgtcccgttcggcaatcgcctctcgctttgacgtggacttatcttctgacgacggcaccggaaccaccgtgccgattatcgtcgcgaatatgacggcagttgccggcaaacggatggcggaaacggtttctcgccgcggaggactggtcaccctgccacaagatgttcccggcgatatcatcgccaagactgtggccaaggtaaaagcctgccacaccgtctatgacactccggtggtactcggtccccacgacacagtgtcagccgcgctttctctgatttccaagcgctcccatcgcgcagtgctggtagttgatgaggaaaaccatcccatcggagtggttcccgaatcggctttggccggagtggatcactttgcccagctacatacggtgatggatacccacaccctgctcttgccggaagggaccggtcccgaggacgcttaccgccagctagccgaagaacacctcgggctgggcgcggtagttgatgaacagggacgcctggtaggagtaatgaccgctccgggcgcagtccgttcctctatctacacccccaataccgataaaaacggcaaactgcgggtagcggcagcggtcggaatcaacggtgacgtggctggacgtgcctgtcagctggtggaagcgggcgtagatgtgctggtagtcgataccgcgcacggttatcaagacagaaccatccgggctttgcaggcagtacgtgctaccggagtggaagtaccgatcgtggccggaaacgtggttaccgcagacgcggtatccgaactggctgctgccggtgccgacattttaaaagttggtatcgggccgggcgcaatgtgtaccacccggatggctaccggtgtgggacgtccccagttctccgcggttctcgaatgcgccagcagagcccacgaactcgggaaacacgtttgggccgatggaggcgtacggcacccccgtgacgtggccctagcgctggcagccggagcctctaacgtgatggtcggttcctggttcgccggcactcacgaatcacctggcgacattgtgcgcgatgcggacggacgcccctataaagaaaactttgggatggcttcccgccgggcagttcgcaaccgtaacgccacctcccgcggctttgaacgcgcccgcaaagaactgttcgaagaaggaatctctacctcaaggatgtatctggatccggctcgtcccggggtagaaaacctaatcgaccagatcctggcaggcgtacgctcctcctttacctatgcgggcgcggctaaccaggcagagttccgggaaaaagcaatcgtcggaattcaaagcgcctccggctataaagagggcgccccggtagaaagctcctggtaaagcagatatcagcgactacagatatagacaaccattaactggctagcgaaaggaatccccttgacccgggtattgttcgtatgtaccggcaatatttgccgttcagtcatggcgcaggcagttgccgcccagaaggctgaagaagagatactagataatctggttttcgactcggtcggcgtttccgatgaagaacacggtaaccccccggattatcgcgcggtacacatcctcgaagagcacgggtggctagtgcccgaccactatgcccgccagattaatcgtaatgatttccaggattttgatctgctactggctatgaccagcggccataaacgcgccctaacccggctagcgcagcgttggggcgccgatgaaagtaaagtccgcctctaccgtgaatttgatcccgaggctagcccgagcgatatggaagttcccgatccctggtacggaggggaacgcgaatttgccgacactatcgaagttatcgagcgggtaaccccagtgctcctagaagtcctctccgagatttcctagttcccgtcactgaatgtcctcaacctcgatagcgacttgtcttcgcgcacactcgcataaatgccgaggctaggttttccctcctgtagacgtccgcgcacaggggcggattttacctcgcgccccgaaatccggaaaatgctctggcattttcacggatttaaggaccgaagcctaccctgcggcataaatccgcccctgcacgctagttgcgtacctcgcgtgagtctcgtaccaactgtgtccctagcgagggagtagatttttccgagtgggcgcggtgggcataagaattcggaaaacgccgctacgttttccgaattcttgggcaggagggagaatctactccctcgcggaacgagcgcttttaccgagccagacccaataccggaggaaaagctaatcacgcgcgcataggtgcggtttgcttagttttgaggtttagcgcttaaaatcgaggaaacgaaaagcgatcgataagggaacgccaatgccgaaaaaaccagtcgaggttgaggacattatcaataagcattcgggagggttgcaacgcaacctttcgaatcggcatatccagttaatcgcgattggtggagcgattggaaccggactttttatgggatccgggcgtactattcacctggcaggcccttcggtgctggtagtttatgccattatcggggcagtgttatacctggtaatgcggtgtatgggggaactactggtttccaatcataagtacggtaccttcgctgatttcattaccgacctattgggaccaggcgccggtttcgtagtgggatggacatattggctgtgttggatagttaccggtactgccgaagttattgcgattgccggttacttcaatttttggtggcctgacctgccacgctggattcccgcgattggtaccgtggcattgttgttcttccttaacgccctcaccgtaaaggctttcggggaaaccgagttttggttctcgatgataaagatcgtggcgattatcgcgctgatctgctgcggagcggtgatggtgattatcgggtttacctcccccgatggtcagcgcgccactatcaccaacctgtggtcacatccgggagttaccggctccggttttttcccgaatggtttttcggggttcctagggggattccagctagcaatttttagtttcgtaggaatcgaactggtaggtaccaccgcagccgaaaccaaggacccggaaaaatctctgcccaaagcgattaactcgattccgctacgggtattactgttctatgttttggcgctggcagctatcatgtcggtgactccttgggattctctcgaccccgaatcctcccccttcgtgggactattttccctggtggggttggtgtttgcggcttcgctagtgaacctggtggtaatgacttcggcagcctcttcgtgtaactcgggagtttattccacctctcgaatgatgtacgcgatggcgctgcgcagtgacgcaccgaaaattttccggaaactttcccgccgctccgtacctttaaatgccttggttgtcacctgcctattcctgctgacttctattgcgttaatggcagtaggaggcacggtaatggaagcatttaccctggtaacctcggtagcggcggtgttattcatgttcgtgtgggtaatgatagtggccgcctacgtggagttccgccgccgcctgccccaaaagcatgaagcatcgatatttgccatgcccggcggatatctatctatcgcggtgatcagtgtctttattgttgcgatggtgttcgtcctcgccctcgatcccgctaccctgtatgccatgttggccagtctgctgtggattgcggtcatcgccgcggtatcgctcctggtgcgccgcagtcctcgtaacgcgaaaatccgcgccgagttcgctgaccgtcgccgccgggaactggcagccgcccagcagcaccaagccaaatagcccgcccccgccctagccatctgagctttatctaacacctcgttgcgggtcgggtggtaaaagcgctcgggggaccccggtgaccctcgcttcgctcggctcaagccccctctcgcatcttttaccgcccgacccttatgcgtgggggagaagttttatccgagtaggtgcggtgggcataagaattcggaaaacgccgctacgttttccgaattcttgggcaggaggaaaaacttctcccccgcgctcaaccgagcacttttaccgaccgcgacccgacatctgcgggggaattaacgggagacttagacagagcgggattttaggcggcgatagcgactaagagccgcgaaaatgtcttggaggcggggcgcggccaggaacgccgggtagcgtccggctgagaaagcctgccaactggaggacgcgaactcagcggcgaagcgggcacacgcatccgcaatgctttccttgccggtggcgtcagtgaccaaagcgcggacggcataggcgatggcttctgcttgcccgggatcaaccacttgagcaagggcggaaatatcgatttcttcgtggttcaagcgcaaagtcgcggtaccttcggcgcgggttttttcgcgccgccccgaggcaggaggcgggcaggctagaagcaaacgtttcctcactgccggatccggccagggagcagccacgctatccgcactgctggcggcgctatcggagctgctcacttcgtgcgccttggcggtggcatcgtagggcaaatagttttcgagcagcagcacttggtcagctagatccaggaaatctcccgagcctcccatcaccataatggtggatactcccagttcttcccggatgcctcctacccggtcgaccaggggaatgattggctcgctgcgcaccagctgccgcatccggctatcgcggagtaaaagattggtggcggaggtatcctcgtcaatcagcagcgcccgcgaaccgcactctatggcttcagtaatcgccgcagcttgagaggttgagcctgaggcattttcggtaaagaacgccgtagtgtctccgcctccgggaagggaaccaatgaatagggaaatatcggtggccgttattgcccgcccatcctcggcgcgcacttttaccgcgtctggcaaagtggcgaccagttcgcgtccatcccccggaatatgggggtaaaccgcgcgctcgagggcttctagcagcgtggatttgccgtgataaccaccgcccacaatcacagtgatcccttcggggatcgccattcccgagattttccccgcatagggcagctctacggtttgcaccaggggcgagggggtttcctgacctaataccgcaggaaggcggaagggaactgcatcattcatcggtaaatcactgattccggaggcccgggccaacagtgccccgtcagccacgaaggccacccatccgcgctcatgaagaatattttgcagcgccacatggtcttttaaagtgtggatatgcccggtgagatcgtctaaatccgggccgtcgtcctcaccgaaacatacggttttataaaccagttcgcacaggtcatagtccaagaagcgagcaaagttacgccctaaaattcgccgtcccgccgccggaaacggtacctgcacccgcagttccagcccgtcctcactaagaatcaccgaggagcggggcagaatttcttgcccgaccggcgcaatccgcagttgcgcctcagatttcccacccgaccgcctcgccccgaaaactttgcgggctcgccgcgccaagaaatcaccgacagctatccgccccaactcgtcagcggcaatctctgcgggaatctgggtggtagccagcgggactaatatccggcatgccgaaggcggggcaaaggggtcggactgcacccggtcaatagagaaagtaaaatccccgaaactccattgtccgattaactgtttatagccgccataggagcgcccatctaatgatttggttttccgaattagctcatccgcatcccgcatagttccctattctatgccgcactcaggtttgccttgtagactagctaagtgacgcgcagattttcggggtctgccccgattgcgcgaataaacttagagaatggaaggaaattttcgtgactgacaagctgaaactggttgacacaatccaggcaatcaactggaacgatatccaggacgataaagatcaggaagtttgggatcggctcacggggaacttctggttgccggaaaaaattccgctgtcgaatgatttaccttcctggaaaaccctgaagccggaagaacagctgatgactaaccgagtgtttaccggtttgaccttgctggataccctgcagggtacggtgggcgcggtttcgctgattcccgatgcccgcaccccacacgaggaggcggtttacaccaatattgcctttatggagagcgtgcacgcaaaatcatattcttctattttctccaccttgctttctactaccgagattaacgagtcgttccgctggagtgaagaaaacgagaatctacagcgtaaagcgcatatcatcatgaactactaccagggggatgacccggaaaaacgcaaagtcgcgtctaccctgctggagtctttcctgttctattccggtttctacgcccccatgtattggtctgcgcatgccaagctgactaataccgcggatttgattcgcctgattattcgggatgaagcagtccacggctactacattggttataaataccagttggcggttaatgagtcttcgccggagcggcgcgaggacctcaaggactacacctttgacctgctgtcagagctttacgataacgaagaatcctataccgaggatctttatgatcctctggggctgaccgaggatgtaaagaagttcctgcgctacaacgccaataaagccctaatgaacctgggatacgaggcgctattccccgcggactctactgacgtgaaccccgcgattttggcggcgttgtcaccttcggcagacgaaaaccacgacttcttctcgggatctggctcgtcctatgtaatcggggagattgttgataccgaggacgacgactgggacttttaggtttcggttcgactcccgcaaccacctatttctggttatcataagggatatgagcaatattcctacttatcctgaaccccgtccctcctcccgcgtcctagtcaccggcgcttctaccggcattggagaagcgaccgtccggcaactgcgtgccagtggctgggcagttatcgcggtggcacggcggcgcgaacgcctagaaaaactggcggaagaaactggttgcgagttttacacttgcgacttaaccgaccgtaaggcggttgatgaaatggtcgctgaactgctaaagaaagggccactgactgcggtagtcaataacgctggtggcgctatcggcactgattcggtggcagatggcaaagtagcggactggcagcagatgtatcgcatcaacgtggtcacggccttgaatgtcacccaggccaccctgccttccttgcgtgaaaatggcggtgacctactgtatgtcacctctaccgccgctctcgacacctatccgggaggcggcggctacgtagctgctaagcacgccgaacagatgattcccctgactttgcggcaagaactggtgggcgagccggtgcgactaattgaaatcgcgcccgggatggtgaaaactgcagagttttccctaaaccgtctgggatctaaagaggctgctgaacaggtctatcgcggggttgcggagcctctagtcgccgaagacatcgctgacttaatcagctggtgcctgtcgcgtcctccccacgtgaatatcgatcgggtgattatccgcccggtagcccaagccaccaacactgtggttgcgcgcgattagggcgctactgaagtctagataaatagttagggcgcaaggaaggttaccttgcgccctaactattttgtatttaccgcgtatctccctataagttacctcaattcgggtacatatccacaggtagatagcggttacctaaattaaaccaacattgcttagagcatacaggatacgcagccttcgacttcggttccctgcaaggcatgctggcgcagccgcatatagtaaagagtcttgattcccttgcgccaagcgtaaatatagttcttgtttacctcgcgagtagtcaccgtgtccgggtagaacaaggttaggctgagcccttggtctacgtgctgggtggccaccgcataggtgtcgataatcttttccggtccaatctcgtaggcatcctggtaatactccaggttgtcgttggtcatatagggcgccggataatagacccgcccgatcttgccttctttccgaatctcgatcttggccacaatcgggtgaatcgaggaggtggagttattgatataggaaatcgacccggtcggcggcaccgcctgcagattctggtgatacatcccgtgttcacggactttttcagccagtttcttccaatcttcgctggtaggcaccttaatcgaagatttttctagcagttcccggcatttttcggtcttcggagtccaatcaccgttaatgtatttctcgaagtactgcccggaatagtactgggattcttcgaagccttcgaagcgttccccgcgttctttcgcaatcttgcaggaggctttaatcgcttcgaacgccacggtcaggaaatacatattggtgaaatccagggcttcttcgctgccgtagaacactttttcccgcgccaggtagccatgcaggttcatctgacccaaaccaatagcgtggctcatactgttaccacgctcaatcgaaggcaccgcccgaatatttgacaggtcagacacgctggtcagtccgcgaatcgcggtttcgatagtggcagaaaagtccggagaatccatagtcttcgcaatatttagcgaagctaagttacaggaaatatctttgcccacctgcgcataggtgaggtcttcgttgtactcgctcttttccgagacctgcagaatctccgaacacaggttggacatagaaatccgtcccttaatcgggttagcgcggttaacggtgtcctcgtaaacaatataaggatagccggactcgaactggatctcggctagagtctggaagaaacggcgcgcgtcaatcttcttcttgtgaatccgcgcgtcctctaccatttcccggtagtgctcggtgatagaaatatcgctcatcggcttgccatagacccgctctacatcgtaggggctaaacaggtacataggctctttattgcgtgccaagtggaaagtaatatccgggattactactcccagagacagggatttaatccggattttctcgtccgcgttttcccgcttggtatccaaaaattccatgatgtcagggtggtgggcattgagataaactgcacccgcaccttgccgtgcccccaactggttggcataagagaacgaatcctctagcagtttcatcactggaactaccccggaggactgattctcgatcttcttaatcggggcgcccgcttcccgcaggttagtgagcgacagcgcgactccgcctccccgtttagaaagctgcagcgcagagttgatgccacgcgcgatggattccatattgtcttcgatgcgcagcaagaaacaggaaaccagttccccccgagcctttttacccgcatttaggaaagtgggggtagccggctggaaacgaccggtcataatctcgtccaccaggtgcttggcgagttcttcatccccgcgcgccaggtacagccccaccatacagacccgatcctcgaaacgttccaggtagcgtttaccatcgaaagttttcaaggtgtaggaagtgtagtacttgaatgcccccaggaaagtggggaaccgaaatttataggcatatgcccttttaaacaggtctttaacgaactggaactggtattgatccaagacttcctgctcgtaataaccttcgctaaccaggtacctcatcttttcttccaggtcatggaagaacacggtgttctggtttacatgctgcaggaaatactggcgggcagcctctcgatccgcccagaactggattttcccctctttgtcatacaggttcaactccgcgttcaacgcgtgatagtcccgatcgggggaaggggcggtttctattccggtgtcagttagattttctgccaaaactcactcagtcctttacggcatatctcaacgtcctgggaggttcccaggagttcgtacttgtacataaacgggatttttagtttttgggcgaggatatcgccggcaatgcaatacgctttgccaaagttggtgtttccgctggcaataatgcctacacagtgatcgcggttgctcttttcatttaagaacttaattacctgcttaggtacggcgcctttgatatttccgcccccataggtaggcaccacaatcacataaggctcgtttacatagaggaaggggtcacgaggacgtagcggaatccttttgttgcgaaatcctagtttctctacgaaacgtttagtgttattagtcgcggaagaaaaatagaccagcagaggttccgaatcgctcacctttgacctgccttattgctctcgatcttcgctaataactgtccctacacagacgcgctgtcaccgctgccggaactccccgctcttagcgtcaggtacttcgcgcggtatcttttatttcttgagggcgttcctgccttaagcagtagctactgcgcgagccgcaattgccaatgccttgatcttgtcggggcggaatccgctccaagaatcattatcggcaaccactaccggagcctgtacgaatcccagggacttgacgtgctcaagagcgtccggatcctggctcatatcaacttccgcataagcaatgctctgcttctttaaagcgcgcttagtcgcatcacactgcacacaacggggcttagagtaaacggtgatcgacatgtttctgcgctccttaatttcgctttcttcgtctgcgctattcaaagaataacatcattgtagtttttctgccgccaaattcaggcggtgagttaaacactacacctagtagtcagctaacgctagtaccccaagatagtgtgtttggggataaccggtggaaagaaggcgaatttctggggataccccgcaaccctaatcaatctactagctggctacccggcacctgcctgctttttaagcaattttctccttcaagacgattggtgagcggttccaccaaaattgtggataaaaacttttcccggcgtgtcgcaagtgtccgcgcgcccggtcggactttacctccctagcgggtcgggcagtaaaagcgctcgggggaccccgatttcctcgcaaaagcgaggatagggaactatctcaagagattaataggtatgtttccgactaaggaagatactgctggcttgcgtgtcccctctcgcatcttttacagctcgacccttacgtaggcggtaccagcgagcgtggagcctaggttttatccgagtgggtgcggtgggcataagaattcggaaaacgccgctacgttttccgaattcttgggcgggaggaaaaacctaggctccgcgcggaaaactgcaggaggaaaaacctagcccctcacacacaggcgaatgaatatcgataaggtggtatccagaacagctacgtattaaggagcaggcgatgagtgagcgcatgaacgtggaatctttcaaccttgaccacaccaaggtggtggctccctttgtgcgggtggccgatcgcaagcaactgcctggcggcgatgaactggtcaaatatgatgtacgtttttgccaaccgaaccaggaacacctggaaatggacacggtgcattcgattgagcatttaactgcggagctgatgcgcaaccacaccgataagttgattgatttttcacctatgggttgtcaaaccggcttttatgccctgatgttgggggtggaaccggaggagttcacccagctgttggcgctgactttcgaagatattcaacgcgctgaccaggttcccgcagcaaatgagcggcaatgcggatggggcgcgcaccacagcctggaaggagcgcagcaggctactgcacgtttcttagcggcacgcgatagctggaatcagatctacgcttaggaagtaaacctattatgaacagttacgacaccgtagtaatctgcgcggaaaccaccgaactagctccattggtgagccgttcttggctacaggaatgcctcgcgcaccgctccgacgcctcctatgcgcctgcagatccccagaaagtgttgccgcccccgcttaaagaactatctggactgcggttttaccctatggatttaccagaactcccggggcgtgtgctcgcggtacaaagcggagtggggatagttaatgctgcccgcgcagccactattgccatcgaagttttaggagccaaacagctgctttactcgggaaccgccgggggcttagccgcagatagccaggtgggggaagttattttcggtgacacctacgttttccataacgtggacgcaaccgcctttgggtatccgcccgggcagttaccggggatgcccgccagttacccgggcactcagaagctagtttccgctgcccgcagcctcttgagccccgtcttaggtacggaggattcggctgacgagagctgcgaaaagactaggcttaacctggctgccttggaaaccgcgggggaaaatggagaaaaagacgcgctattgagctccttagagggggttccggcacgttatggcactattgcgactggtgattcttttattactgacgccaatgtccgtgaggttcgcgcggctttccctctcgctctagccgcagaaatggagtcggccgccgcagcccaagtggcttacctatccggggcttccttcttggcggtgcgctgtgtttctgacctttgttccccggcaggccaagaggtataccacggtaacgccgcggtttgcggggcgctggctgccgctagcaccatctgcctactacgctctctctaaggctaaagtcactggctcctacaagttatctgagacagctttctagttatgctctctgtcatgtagaccgggtagtataaccgtataggttattactactaggagaaatcgtggctttgtctttttcccgtcgcatgaaactaattattgcggtagtcgtcggggtagtggtgttagcagctgtcggcggtgccagttacgcgataaccgcagacaacccgggtaaatcccaaaaagcagctgcctcaacaacccgccctaccccaaagaagacgcctggaaaatccaaaactcctaccgctacccccagcactaccactcccactcaggagccagtgaactgcgctgaagccaaatgtgtagctttaacttttgacgacgggccgggagctgacactccgcaacttttggatattttaaaggccgaaaaggttccagctactttccttttagtgggcaagtcggtcgccacctatccggatactgttgctcgcgaggttaaggaaggacattccattggtgcacacacctggtcacacccggaactgacaaaacttgccgatgcaggaatagttaatgaagtcaactctacagtcgaggcaatcagcaaggctgccccggacgccaaggttacttttactcggccgccttatggagcgttcaatcctcgggtaatttcggtcttggaatctttgcaacacgcagctgttctttgggatgtggacactttagattggaagaatcgggatccgaatgcggtattacagaaggtgaaagagcaggtaaaaccgggttctattatcctgatgcatgatattcaccccaccactatccaggcggtacccgaggtaatcaaatatttacattccgagggatacaccttggttacggtaccggaaatgtttggaggctccctaacccccggtaaggtttactttgatcaaaatctgattcagtaaccaacccgttttaaattctcccggtgaatccgttagaaccccggctagcggcaccggcacttagggttcgggagtgatttccgaatctaactgggcatctgggtgggcggcgattagatcggtcagcgaggctgccgaggtgatcatttgcgccatcccgtgcgtgcctactacccccgccaaggcagcccctacccccatttccgccaaggcatcggctttgagtcccggccagccgtgaagccgcttttgcagatcggaaggcacttgcgccagcccgatccctgcagcaaacagcgccccgactagcccggcaatagcatcggttgccccacctagttggaccgctagggacactgccctccgaaatgcatcttgcccactgagcgggttttcacggtgctcgattttaactgcccgcaagattccagcaactgcctgcagggcgggaaccgcataggtgttgtcacgaggtggtttgaaataggtttcttctgcctgttgcagccattcacgccactgctcacggcgagaagaggcaagcaaggcaatcccgctacccagatttatccggctcgcccaggattcatcaccggggagcgggtcggtgactgcgcggcgaatcgcttccgcatagataatcgccgcctcgctagccagggaatccacgtgggtaagttcggtgactgcccgcaccgattctgccgtccactgcggatcttttatacgagtcagcccgagaatagcgcaacgactaagtggaccagagccgttggtacgccgggtgcgcatatggaaataggccgcagcagaacgtatttttcgcgcgggattcacattggaaatatcgttaacggtagtttccaataccacccgcgtgggggcatcaactttacgagtacccccctgataccaggctaaatagcgggaggcaatcgcatctagaccttcttccgtggtgaggtcaattccggttactgccacttcagctagacagattgctagctgggtattttccgaccattccccgcctgctagacgcccttcagcccctaacattcgcggggtgcctgccagtggcggagttttgaattcgtagccaacgcccagggcattaccgcaggcttgcccaactaggactgcgctagtccgatccgccatgatcgcgaggggtgcttgaccaccgcgtcggatcaagtcattttcttgatcgccgcgttcccggtttgtctcgctcgcctcagccaccctttcaactctaatgcacgcctggcctaacaagccaccagccctggctagagcgcatggttatttctctagccagggatgcttcccactgagacaatgcccgcagtttctaagttcatctccgacgcgcccggtaggaaagtagcaaacccccacctcctagcgccactaaacctagccccagcgtctgcgaggaattcccaccggttttggaaagcacggtctgtaccaccggaggaacagtcacgggtggcagtgagtattgttcgctagtttccgtctctgagctgcggaaaggctgggtacgcgcgtcacctttataggaactcacaaacacataggtatctttgcagggcaaccgcttgagactaagcggtttaccgtctatgtctttatctaccgtaaaggtaccgttcttggcgggaacttctattgaggccaagggtttcttgcctttcgcgtcttgatcttttataggttccggcaaacagtacaggtcattgcgcacaatcttttcgtctgcctgccatttcccaatgccggtaaaatcggggtgatcttctgggaatccactcagttctacctggtcagttaaaatcttatcgtcttcactaagcactatttttgcctgggtttttaccttaggggaaaacggtactacctgagtttctgcttcctcaaagaaagcaggtacatagtctgatttcaaataggtgccttcgggctgcgaactgcgctgaaccgccgccacaaacgtataaaaccctggtttttctgctttatagggttcgctctgattagagatactaaccccagctttagcttcttctgcactcttcggagtggcggggatctgccaagtttgtaccgctttttcctccggcgggatctcaccggggccgcgagcagagctgaacggtccgtaaaccgccaaatcaaccatcacggtctgccaactctcctctccggttttcttcccccactctccctcagcttttaccgtaatctcatcgctcagggtagccccttgctcttgcggaagcatctgcgattgggtttcagtttttacgctaaagaactgacgcggttccgcatctgcagctgcactaacgccaacttgcgcgggcgcgccagcaatcagcagatcttgccaagtcgggtgctcccacacctcgtaactaaccggtggaagcccgtccgccttcacctgcacacccactttcccgggtgcggttacctctagaggaatctcttgtacgctctcgctagaggaaagtttaaaggtgttctcttgattctggtcggaaaaacgtgcgggcccggataaggtaacagtttcatttatccccgttaggggctgcccggcagcgctttgcaacaccggtaagcgcaagattccctgggtagaaccagtagcaagttttatttccggagtactgattctatagggaccagcgtaggaggaggcctctatcaacagttgctgagcacgctgttttaccgtgtccgaagggctttgtttagaggttaggcgccctgatagagaatgaatcgcatacacggttgccgcaagttcggggtctcctttgtcgatagcgctacgcaattttccaaccagataagcaacccggtattgctgcccagctgaaaaaaccacagtctcgcctttctctttcggtttcatctcaaatgtttgtgcattagagcggtattcttgtccaccactaatcaatcggcttccctgatagctgacccattggttgcgtggcgaatttagctgccgatccgtggcgcatactgccaccttgctgccatctgtagatttgcgggcatttagttgtatggcggaatttccatagtttttccagactgtactcggccctgctgcctgggaaatttgctgttcactggccactatcactgaggaagcaaccgctattactgcagtcacccccacaaaaaccagccgttttcgtaaccgcgtgcgtcgccgccgcccgggactaattctggaggagagaccggaaatctgatgattttttacgtatttaatgctgttttttctttgtgtttccatattttgcagatttccacttacgtttcccgggagcgatgtctgaaaaatcagctggggaaaacgcgtcacatccttggctggggataactctctaaacatctctcagaactgtccttgaagcacgttttacgaggccagagaacttacacctccaagagatttaaacaatacgttcgcagtgatccgcagagataacttttcgttactgcggataagcgtgagaacataggacatagatacaacgcctggcattagaaaaagatatggcaatgaaggtagtaagtaatgattagctcggttccgccaccgcctcccgagatgactcctgcttccggcgcccctcctacatctgctcccatacgtgctggtgcacccgcttttgccgtttccaaccatcctggtccccaccgtcttgcacctccccctcctgctcctgcttctccacccgcttcttccaatagccaagcccctaaagccagctaccgaattttggggctggatggtttacgcgcggtaggctgcgccgcggttttgctttaccacttgttgccggaggctgcgccgggaggattcctaggggtagacgtattctttgtgctctccgggtttttaatcaccgctttactggtgcgagactacgaaaaattcggcaaggtaagaatcacgcggttttggttgcgccgaatccgccgcctcctacctgcagttgccgctaccggtttttcttgcaccataattgcacttttcgtttcccgcgacctcttagtagggataaaaagccagctcgctggggttttaacctttacctataactggctaaagattttcaagggtgaaaactatttcaccatgtccaatcctgatttgttcactaatatgtggtcgttggcggtagaacagcagttttatctgttctggccactggtagtgctgttgctagtattgcttccgcgccccctcaaggttctggcagcactacttctagcggcagggtcagccttcctaatgggattaatagcgcccgacgatttgaatcgtgcctatatgggatcggatactcacgccttcggtttaatgatcggagcggcgctagcgtttgcggtccgatcgcccctatctcgcgcttcttcccccgccaaaggggcgcaactgcgcggtttagccggaattcttagctttctcgtgctcttggcttgcttctacctcgttcccgaccagggaaaatacacctacccttggctgactctgtcagtttgtctcgctgctgctttagttatccaagcggttttagctccagtaatcatcactaaaaccgcaatgtctcccctggttgtggtgctcgacagcaaaccatttgtctggctgggagaacgctcatacggcatctacctgtggcattggccaatcttggtcatcgctcgtactgccgctcctctgctaaatccgttaataaatgccctggtagtaaccatactttcggtacttttagctgccgcaacttaccgctggatcgaaaacccgatgcgcagaggcggaatcttgccgactttgaaacgctggatggccccgattaggaagcgcccccttattactgcttgccggtgggtggcaatctgtactttcgtatcggcagttatcgttagcgtagcgttggctccggcaaaaacctccgcacaagaggcagtagagcggggggaagccgctaaagctaccgttagtgagactccctctaagccttctagcaactcccctgttccttcaccgcgtggcctgccaattcaaccggtggaagccaatgtaactttcctgggcgattcggtaatgcttgcctctaagggcgagattcaggcggctttcccgggcgctgtggttgatgcggaggtttctcgcgcctggccaaaggcggtatctctgattaaccagtataaagattcaggtcaattggggcattgggtggtgctgagtttggctaccaataccgacttaaaacccgagcagattgatccagtgcggcaagcattaggacccgaccaccacttggttttggttaccggttttggtccggccagcgaaccttggatttttagaaccaatgacgctttgattgcctacgctgccgcccaccctaaagacaccctggtcgtcaggtgggatcaagttgctcctactatccgggagcatctggcctccgacagcgtacaccccgatcaagagggtgcgaaacgctgggtagctgagctagtgcagaccctcaaggactacccgggagttactcaagtcggtacgccttaacctgccaaaaccgcctgacacaccctaaaaccagcggataacacgcgggatttcaaccagccaatacttgcgcaataattgcttcggtttgcccggggccggaagttgcgcgggtttgcaccccggtgcgcaccgccgggtagtcgtttccatcggggtcaaggcgatccccaacaaatagcacctgcgcgggttggagcccggtttgctccaggaactcccctaccccgtaggctttatcaatccctttcatggtgatatctaccgaggtagaaccacctgaaagtacggtcagttccggcaacagctttcccgcgcgggaagcaatttctgcccgtttttccccgctaggatcccaagcgtccttttctgcttttcctgcctgctgcccgagggctgaataggttaactgggagccgcgatcctcgatgatttcccctaccggattgtcgcaccaatatcccagggaacgagcgacctcctcaatcacctttttcgctttgccagcaagatcgggatccatgtctaggacatatttggcctgccaatcgccattttcaaatcggtagtagcgggtgccgcaagtgggcataagatgcaagttttccggcgaaaatacttgtgactgcaagggaattagtaactgccttgaaaactgatgaagagaacccccgctgattactccggtgggaagagtgcgggtgaggcgcgcaaattctctagccagtcccgcttgcattgcctgctttgagggggtcagagtgccgtccaggtcaaacaccattgccttaatcgcgcccacttctcacctttctatttgcgatgaccttaaaccaattagctattgtaaagcctaaagcgggctgcctcgttttttacttcctgggggcagattaaaatgccagctagtcgcgtaatcacagggcaagctagcctgaagaccggcaaatccgagagactgccccatgcacccgaatccgcagtaaaatttcaggtttttccagcctctaaccggtatgtaatcgttttcacaaaagctgttttaatctgccttaaacctcttatcacctgcatatttaagtattgcacttaatgaaattacccctcgtttctcatttttctttgtctagacattgactaggggcgtgaaagctttctatagtaatcatgtaaacgtttccacgagggagagagttcaaccggaactttccgaatcggaagaacagaaagagagaaaataaaaatggctattttggttgcaccgtcaatcccgatgaactctactcggctagaagagccgagcatggttgctgctgtcgcgtttttcgcgctaatgttcgctggcgctgggattaccctagtcggcattgtggcagcttctgcgattactactattctgggcggactaatgaccgtcgttagcactcttggagtgacttggtctcacctatacttcaagctcaagggagaataggttactagcggcaacggatctagttgccagcaaacacctaatgcgcgtcgccgccagcgacgcctaaagtctgaccgagcgaagaaaaaaagacagataccggtaaatctggacactgtccacataaatagggatgatcccaaacctatgggttactacccacagattacggaatcagcctaggaaagagtctaagcttggcagactctctcaagactgttagcaagtggggcggatggatttccatccgccccacttttttgcgcttatacacttatctcgtcccttcccgccccttgaggtcaggccgaggctccccaatgccagcgagattttcgggagggtatctcttttgcggctaagccagttcctccccttaatacgtggctacctcgaatactggggcagcagcgagaaaaaagccaagggcgccgactcactaaaaccacacatactaaaggacgggcacgtcctttctcaaaaagaacgcgcccgccctgaagtcacagctagcagctgccgaagcgattaacggaaaccgtataacttacagcgacatatctaccacagcgcggccttgtacctcgcccttggctagcagattgtaggtggcaccggcttcttccagcggaacccgcttggtaacaatcttcttgtaatcgattagcccctgatcagccatgcggattacctccggcagatcctggcgagtacgagctccataggatcccaaaatgtgttgagaacgacgtaccagacgattgatttctacctgagcggtctgcaccccggcacctaggccaatcggcaccatgcgtcctccgtctttaagtacgtctagcgcggtagtccaggtttcaggacgcccaagcgcctcgaaggccacatctaccccgcgtccatcagtaatcttcaggatttccgcacgcgcatcctgggtaaccgaattgataacgtcggtcgcacccaattctttagcactggctagtttgtcatcggaaatatcgatacccacgacctgccgcgccccgaaggccttggcaatctggatgatgttcgagcctacgcccccagtggcaactaccgctacgctctctccaaagtgcaggtcagcgccacgacgcaccgcgccgaaagcggtcatcgccgcacagccaataatcgcagaagcaaccaaatccatactttcgggcactaccgctaccgaagtggagggcactaccgcgtattccgcgagcccacccatggagtacatggcgatttcgctaccgtccaaatcagccaagcgggtggtgccgtcatagagctttccctgcaagcggttgaggtcgaagaagggcgcacaaagatcatcgcgtccggaggaacatgcctcacactgaccacaaggcattaggaatgctcccgaaacatactgacctactttcaggccggtgtgctcgttaccttctcccagttcaacgatttgcccggcaacttcatgaccgagtacgcaaggcttggggaaattgattgctcccccaattacgtgcaggtcagagtggcaaagtccgcaagcagccactttgataagtacttctcccgccttggggtgaggggtgcggatctcgtttacttccagtcctttatcaatatcgcgtagaactgcggctttcattgtctcgggaattgtcatatcctgctccttcgctagagtttcgtttaaaaactttcttgaccttgcagctgcggcggacactgccgcttctgtcggttaagtccagtatcaaccatatttgaatctttgtccatacattttgacaaaataaaatatttatccggttactttcgaactagagaggatttgcccgggactaatggcacagacaatcatctattttgggaagggcgaatactagctgcatactgttagcctcttcttgaaataattgtaagtacaataacttcatagctagatttgctagtctaaacccaacattcagaaataaaaggagaggcgctgctggttcttaccccgggattgatcctcaccttggttgcctgcgccattatgtgcggactggcaaaaaccgcgctgccgggactggcatgcgtaccggtggcgatcttagctgcggtaacgcccacccgcccctccaccgccctaatgctactgatgctgctaaccggggatttactggcaatctggacctaccgcaaggacgctgactggaaagtcctgcgcggtctatttccgcctgtagccgtaggggtagccatcggcgcactttttctggcaaaagtatctaaccagataatgaaagtttccatcgggattattattttggctcttactgccctcaccctggcgctcatctggtacgcgcgtcgcaccgggcgcgacctgggcgcttccatgagcgcttctttgcctgcacgcttgttttacggctccctatccggcttcactacgatggtcgctaattctggaggaccagtagtctccctgtatttcctggcctcccgttttgaggtccgccgctttttaggtactcaagcctggtttttctttatcgtcaacctgctaaagctacctttttccgccggcattggtctgattgatcagcaaatgttgctgatcgcgctgtgtctagctcccctagttctgggggcagccgtgctggggcgctggtggatagggcgtattgacaataagatctttgatccgattgtcactgccctaaccatcgtttccgcagtgatccttctgatctagccgcgagtacgccgcgtaatctgcgggcgcgggaaacctgctaagcgcggggaaagatttttcctcccgcccaagaattcggaaaaagaccgcaggcattttccgaattcttatgcccaccgcacctgctcggataaaacctttacccgcgtctatttacactcaataccacgcacacttttccctgcagttcaccgcagtaagaaaataactgagagctaatcccataatcggttccacacgggttattcaacacatggaaaagcgggggcgagctcagctcgcccccgcgtatcaggtaactgacctacagattttcacctgtagatttagcaattacttgctgtaaatgtgctccatgtaggattcgatttcatccaaggaacgagcgacctcctcaatcacctttttcgctttaccagcaagatcgggatccatgtctaggacatatttagcctgccaaccaccattttcaaaccgatagtagcgggttccgcaggtgggcataagatgcaggttttccggcaaaaacgcttgcgcctgcaagggagttagcaactgccgcgaaaactgttgaagtgaacctccactgattactccggtgggaagagcgcgagtgaggcgagcaaactctctagctacacccgcttgcattgcctgcttcgaaggggtcaaagtgccatccaggtcaaataccattgccttaatcgcgcccacttctcgcctttccattcgcggtgttttccggccaactagttattgtaaagcctaaagctgaatccgtagctttcacttccctctagggtagcttcccaaaggtcgcagccaagtttaaagattgctaccctcctccccaatcccgggtcatgttccaggctttaggtgaagctcagaattcgccccgttccccggattttctaactctacaatgggtatgtaatcgttttcataaaaatagttttaatgcattatttattgctttgaccagggctgttagctgtaaaagctgcctaaaacacccggcagttctcatattcttttctcagacgttgactaggggctagaaatgtccttatagtaatcatgtaaacgtttccacgaaggcgaaagttcaaccggaactttccgaatcgtaagaacagaaagagagaaaaataaaaatggctactttcattgctccttcggctccgatggcttctactcagctagaggatcctaaattccttgccgctatcaacttaattgcgttattgatttcaggcgtagttattaccttgctcggcattatcactggctccatgatcgccacaggtttgggcggattgctgaccgttggcagcgccatcggtcttccgtggtcgctccgttacttacagggcaaggacaagtaactttcggcaacaaccagcttttgttgtcaataaaattcaataggtgtcgtcaccagcgacgcacaaagtcttgccaagctcagtattaacagggcgcaaagctaggtaacagcttgctgtttgcaaattgcaagtagctcagaaattcttcagagcctggcagactctctctcaagactgttaggggggcggatggatttccatccgccccccctgcaattgcaggctcccatccctgcgtattacgtatttagcggcaaatttacagtattaaatacagttttctaggctactagctgtaaatgtgctccatgtaggattcgatttcatccaaggaacgtccggaagtttccggcatgatcttgaacaacaccaccgcaatgatcaggttcaacaccccatacatcgcataagtgggtccaccgcccagagcggcaatcatcggcgggaaagtccaggtgatgatggcgttcataatccacatgcagaagatggcagtaccattcataattccgcgcacatttgcggggaacatttcacccagcattgtccaaactacagtaccgttcgaggactgcaccaccagcatgaatagtgacatcattagcagcaccaagtaccctgcccacaccggcacgctgccggctgcgtcatgaggagcaatcacaaactggaaaattagggcgattcccagcaacaggatacctaccagggtgacgtcccagatcaaaatagtgcgccggcggaacttggtaatcagaatcaagccgatagccgagcctactacactcattacgccgttagctacctgcgcagtaatcgcggcagaagttcccatgcccgcgatgcccagcaccttcggcgcgtaatacataaccgtatttaccccggtggtctggttgacaatcgctaagaatatacctacgaacatcagtttgcgcagccagggcgtgttcattacgtcgcggaaagtacctttcttgccgtgttcttggctttgacgagcctcaatcatctcgtgcagttcctcggtaagatccccatctttcttggggtcacgcacccgtttcaaggatccgatagcggcgtaaacttcctgctgcagcacatgccaacgggaagattctggcatcaggtgcatcccaatccacagggcaacggcaggcactgaacagagcacaatcatccaacgccaggcggcaccgttaccggccgaaaccgtcatattggagatgaaatcatgtgctgcctgcacatcgtgactaccaaggtgcttagacactattgcgttcaaagcatcccaagagtactctccagccttcactaccccagcaggatctgatttcacggtaatcttcggtccgccgtgagcagagttaataatcgcgttcatggagaaggccaacagctgcccgactacaatcatcaactggtcaacggccacgatagtaccgcggatccgcttaggtgcagtttctgccaggaatactggcaccgttgccgaggcgccacctacggctagccccaggattaggcggaacggatacattacccaaatattgggggcaaaagtattaccgatagcaccaatcaggaacaaaatggccagcataatgatgttgtgccggcgaccataacgatcggagagccgtcctccaaatagcgccccgaaggcagcacctagggtaaggataccgccaattgcgccctcttgagcaggagtaatccccatgccacctgcaccgtgcggcatatacatatagggcaaagcaccggaaatgaccccggtgtcatacccgaatagcagggagcccagggtggccactgccgccacggcaataactccgcgatgatttcccgaggacggggtttcctgcaccattttttgcagtttttctttactcaactcattcagaggagttttttctttatttatttccactggtttagctttctttttcgaaggggtgaagttacttatcgtaggtggtggcgccgcttacctttgcgacttcatgccaacacccatccgcagctgattccacggtagcctgatctatttcggcagctgaccaaccatcggcgactgagggcgcaatctgtttaccggttaacactcccgacaggaactggtagcactcgactgctttcatatcatcgaagcccattgaggtgccggctcccggctggaaacgcgagaaatgcggatagtgaggattggccattgaacggacgtatccgtgtatcactccattgtcctgtccgatgcaggcctgcagatcattgaggtattcgaagttccaacgcactgaaccttcagtaccataaacttccacaatgtactcggcacgcggtcccacgctcacgcgagaggactccatggtgcccaccactccggaatcaaaacgcaccatcatggctacgtagtcctcgtttccgacttccttcttttcgtcagaaacttcccaaccggtgtgaccaacaccggccttagtgggaataggacgctctttaataaaggtgtcagtcagggcagaaaccgagctaatccggtcacgcaaaatatattgcaccaggtcagctccgtgactcatcaggtcaccaacaaccccagcacctgctttttcccggtcgtaacgccaggtgtagggaccgtcggggctggaggcataatcggcgattaaccagcaacgaacattggtaattcgccccagcttcccttcagcaatcatttcccgtgcctgttcaaccgcgggagtgtggcgatagttaaagccaaccgcggtgttaatgcccgcgttttgagcggcttcggcaatttcgcgagactcggtagcacttacgcccatcggtttttcaatccagaaaggtttgccggcctcagctgccgcgactgcaatttcacggtgtagaaagttaggcgaacagatggacaccacgtccacttccggatctgcgagtacctcgcggtaatcggcaactgctttctcgaaaccgagcgcctcggtcgcgagcttttgggtttctgcgatggggtcacaagctaccaccagacgcacctcggctcccagctctggaaatcgctctgccatcgctttatacgaacgcgtatgcaggcgccccatccagcctagagatatcacccctacgccaattttcttcttatctgacatataaactccttacccagccaccattggctatcgtttgagtggcagtaagagcttcgattgctcgaaataccacgccctcaaatctaaccgaaacttttcggtttgtctaccactttgacataacattttgacaataccaattctgcttgtcataaagctaaagaaaatataaaaagacgcgggatgagtcaaccgggtaacacccgataaactcaccccgcgccttgcagctaaaggaatcagcttagaggatattatcgtcctctagcgttaacgattacctcgaaaacctttagtgaaaaactacttggctttctcgataatttcgctaacccgccaacgcttggtcttggacaggggacgagtctccataatccttaccaagtcgccagtgccgcattcgttgttctcgtcatgcaccttgtaacgcttgcggcggttaataaccttgccgtacaagcggtgcttcacacgatcttcaacctgcaccactacggtcttgtccatcttgtcggacacgacgtagccctgcagcaccttgcggtgattacgctctacagtagcggttttctctgtttcttcgctcatgaatcctactcctcaacctgcggagcggtacgaataccgagctcccgctctctagcgatggtgtaaatgcgggcaatatcgcgacgcaactgcccgatctgtccgcgatcttcaccggcaccagtggccagttggaaacgcagattgaacagctcagtcttagcttcgtctagtttcttggacagctgttcttcatccaacatatccaaatcagacattttcaagccttttgccattactgatcaccgccttcacgactgatgaaccgagtcttaatcggcagcttgtgctgcgcacggctcatcgcttcccgagcgatatcttcggacacgcccgccagttcgaatagcacacgacccggcttcaccggagccacccaccattcgggagagcctttaccggaacccatacgagtttcggcaggcttcttggttagcggacggtcggggaaaatgttgatccacactttaccgccgcgcttaatgtagcgtgtcatcgcgatacgagcggcctcaatctgccggttagtaatataggcgtgatcgagtgcttgaatcccgtattcgccgaacgccagttcggtaccgcgcttagccatgcccttacggttggggcgatgctgtttgcgccatttagtcctacgaggaattaacacgttactcctccgttccgttttcttgcggcttctcggcctcggctactggcttttcagcgggagcctcggtagattcagccggcactgcgggggcagcattttccgaagccgcagcctcgggggtttccgcctgagtctgggcagcgctctcttgacggccttcaccgcgtcccgagcgacgtcctccgcgtgcaccttcacgacctgcgcgtccgcgacgtccaccgcggccaccccgtccaccggattcaacctgtttgcgagcgaattcggtttcggtgagatcgcctttatagatccacactttcacgccgatacgcccgaaagtggtgtgagcttcatagaagccgtagtcgatgagggcgcgcagcgtgtgcagcggcacccgaccttcgcggtagaactctgaacgcgacatttctgccccgccgaggcggccagaacactgcaccctgatgcccagggcacccccgcgcagcgctgactgcatacctttacgcattgcgcgtctaaaggacacgcgggcagccagctgttcggcaataccttgcgccactagctgggcatcaatctcggggttcttaacctcgaggatgttcagctgcacctgtttaccggtgagtttctccagatcaccacgcaggcgatccgcctctgctccccgccgaccaataacaatgccggggcgggcagtgtgcagatcgacccgtacccgatcccgggtgcgttcaatatcaatctgggaaataccggcgcgttccaggctcttttccatgatcctgcgaatacgcacatcttcatcaacgaaatcactgtaacgctgtcccggcttagtggagtccgagaaccagcgggaacggtgatcggtggtgatacctaaccgaaaaccggtagggctaaccttttgtcccattagtcgttctcctcttcctgtttgccgtcagaaacctcgatagtgatgtggctggtccgtttgaggatccggccagcacgcccttgagcgcgcggacggaaccgcttcatcgtgggaccttcatctacgtacgcccgcgaaactttcagttccgcaaacgtatctttgtcgccaggccgatcagcttgagcggcggcgttgaacattgcgctgcgaagcaccttgcgaacatcagttgcgaccgcctgaggagcgaaacgcaggatgtcgtaggcctcgagggcgttcttgccgcgaatcaagttcacgacgcgacgcgacttctgcggcgtagagcgcacgaaacgcgctttcgccatgccttccatctttgccttctttctcttcgggcgcgcctaacgacggcgtgcctttcggtcgtctttgtcatgtccgcggaaggtacgagtgggcgcaaactcgcccaacttgtgaccaaccatgttttcggtgacgtacaccggaacgtgtttgcgtccgtcgtgtaccgcgatagtgtgcccaataaaatcgggggtaatcatagagcggcgtgaccaggtcttgataaccgactttttattggcgtcattcagagcgtcgacttttttcatcagatggtcatcgacgaaaggacccttctttaggctacgtgccatgatttatctcctacctaacgcttcttgccggtccggcgacgacgcacaatcaggcgatcgctggccttattcggacggcgggtacgaccctcgggcttaccccaggggctaaccgggtgacgaccaccggaagtacggccttcgccgccaccgtgcgggtgatcaaccgggttcataaccacaccacgtaccttgggacgatgccccttccagcgcatccgtccagccttaccccaagtgatattgccgtggtcagagttgccgacctcgccgatggtggcgcggcaagcagcctctacgttacggatttcaccggagggcatacgcagctgggcgtatttgccttctttcgccactagctgcacggaaactcccgcgctgcgagcgattttagctcccccaccaggacgcatctctaccgcgtgaatcacggtacccaacggaatgttggttagcggcaagcagttgcccggcttaatatcggcagccggcccctgttcgatgcggtcgccctgatgcagtttattcggggcgatgatgtaacgcttgtcgccatctgcatagtgcaggagggcgatattggcgctgcggttcggatcatattcgatgtgggcaacctttgcgggcaccccatctttgtcgtgacgacggaaatcgatcacgcggtaacggcgcttatgccccccgccacgccggcgggaagtgatacgaccgtcgttgttacgtccaccagttttgtggataggacgcagcagagacttctccggatggtcgcgagtgatttccgcgaaatcggaaaccgacgcgaagcgacgcccgggagtagtcggcttgtatttacgaatacccattacttgttcaccccttacgcagacgcttcgttgaagatatcgattgtgccttcggcaagggtaataatggcgcgtttgctatctttccgcttgccaaatccggtgcgagtacgtacccgtttacctttgcgcgcaatcgtgtttacggtctttactttcacatcgaagattttttcgatggcgatccgaatctcggtcttattggctttggggtctacctcaaaagtgtatttcccctgatccatcaggccataggctttttccgagacgatcgggcggtaaataatatcccgcgggttcttagtaacctcgagtgccattgctttacgcctcctgtccggtcttatcggcgatgaactggcgaatcgcggcctcggtgaagataacgtcctcgttattgagtacgtcataagtattgagctggtcaaccatcagcaggtgaacctgcggcaggttacgcagcgacaatatctgttcttcttccgggcgggtaagcactaccaggacgtagcgctgatctaccagggattcgatgtgttcgcggccagccttagtcgagggggtttccccggcaaccaactgggacaccaagtgcatgcgatccttgcgtacccggtcagatagggcgcaagccagagctgcggccttcatcttcttgggggtgcgctgagagtaatcgcgcgggtgcgggccgtgtacgactccgccgccccgccactgcggcgcgcgaatcgagccttgacgagcccgaccggtgcctttctggcgccacggcttcttgccgccaccacgcacctgaccacgcgttttagtcgagtgcgtaccctgacgagccgccgcgagctgcgcgttaactacctggtgcattaaagaaatattgggatcccgatcaaagatgctggcgggcaggtcaacgctgcctacttccttaccagcgggatcagttacgtttagcgaaagattagtcatagttacgcacctttcactgcactacgaatcagaacaataccgcccttgggaccgggaatagctccggtaaccaggacaatgcctttttcggcatcgattgcctgaactttaagattctggatggtcctgcgttccccacccatgcgtccggccatccgtaggcctttgaatacgcgtccgggggtggcgcaagcgccgatggaaccaggtttgcggtggttacggtgagcaccgtgggaggaggaaacgccggcaaaaccgtgacgcttcataaccccggcgaaacctttacctttggtctttccggtaacatccactttttggccgacttcaaaaatgtcggctgccaattcctggccaagagtgaaatcgtcattgcctccggtacgcacctctactaggtggcgacgggggctgactcctgctttatcaaaatggccggcaaggggtttggtgactttccgctgatcgatctgcccgaaaccgatttgaatggcggtgtagccatcggtttcctggtctcgaatctgcgtcaccacgttcttgtcgacctgcacgacggtgatgggaacgacttttccgtcctcgtcccaaacctgcgtcatgcctagcttgcggccgagaagtgcccgagtgggtactgcggcagccggctgggtctgcgtggtcataatttattttccttagagtttgatctcgatgtttacgtcagcaggcaaatcgagacgcatcagcgaatcgactgccttaggcgtcgggtcgacaatgtcgatgagccgtttgtgcgtacgcatttcaaactgctctcggctgtccttgtacttgtgtggcgaccgaatcacggtgaacgtgttcttttcggtcggcaaaggtactgggcctaccactgtggcgcccgcgcgctggaccgtttccacgatctttttcgcggacgagtcgatgacctggtggtcatatgacttcagccggatgcggattttctgtcccgccattccgtctacctcttcttcttccgtagatgtttccccggtgtttatcccgggcctgccaggggatcgaatcccttgcttgcgctaagcccgctagggcgaacttagccagctacaagcgcgcaagaatccctaaaaaagtttagggaggtgatctttacgatccctgacgaactgtttcgccaggcacgaatcgattcctgcgttcttgctgccgggcgctaactgagcgggtacgcagagcgcacctttcaactagagccagtaaactactttaacgcgcttgtaagaaccctttcaagctgcggtcatgtgaatgaccccacgtccacgcatccgggcgtgtcgcagcactcattttctgccgcgcatggggtgcttttcgtaacgtcctgcgcggaaactaggttttccttcccctccgcacagcagcaggattctcccctcctgacgcagcggggctgccgcggtaaaagcgctcgggggaccccagtgagccttgcttacgctcggctcaagccccctctcgcatcttttaccgtgccagcccattcgcggcttcagcacttgcgggtacgtggcaccgtaccgcgcgaggactaggttttatcccagtctgctaggcggcgcagaaatcgaaaaatgacctggtaattatcgttttcttgggtgggaggaaaaacttttcccccgcgcgggcttggataccgcgcgagggaaaggactattaagctgcggcggagtttctttaagcttccgtaagggtttcttcgtcttggggacggcgccgcaaggcggcaaccaggatgccggtactaaagaggacgcccgctgcaatcaggaacggcaccacgtagacaccggtcttgggcatatgcggcttcgccgggggcggggtcacgggagccggagtttgttccgccatcatcttgggggcaatcgaaatgttaaaagtccatacgtgcaggtcagggttaccggagggcatggttatcaggaacggcttgatgcgaccatatttatgggtagtatctgccggtttctgatcactcaccaggtacagtccgaccggcaggtcagcgaaggtaacgttgccttgatcatcggtggtcatggtttttgccggctctaagcctttggcttcggcctgcttaaccgtcatcttctgcagttgcgtccaatccgcggtaggtaaatctacccctttgacccggttaatctgaatcacctgtcccccagcgggaccattaggcaaggctcccggtttggggtcgtcatagggattggcggcagtcttggtgatatgcaactgtccgaggcgcgcgggattgaaacttgcgggatcgaggccggtgatgtcacccactactactggttggtccgattgcggtgaagccatcgctgaggttggtaccagggcaagcattagtgcggccagcagccccaagcctgctttcagcttgcgtcgcgtgctgttcactgtgtcctccttgcttttcgtggcgggtaacgggtagttatctcggcgtcggtggcggagattccgccactggtaatcgggggtgaagccccggatgctttcttattttctttttcgtcctcatcgcggcggcgctgcctccacagccaccaaccgagcagcagagcggctaggcaagccacaaaaattatggctcccatccaccatggccattccagctttccggctccggcgaaggggtcggtcttatccatcggcacccgctccccggtcactaacagccgatggctgttaattccgtagggcgtgcaggtgaggacggttaaaaggtctttgccttcttgccgctgcagggttttcacctggtcggggcgaactactcgaatccaacgcacctggtatttgagcttttgccccgctacctgcacatagatagcgtcacctttcttaaccttggtcaggttatcgagcaaagtggctgttgagagcccgctatgcccggtgagtaccgcgtgcgttcctttaccccctaccgggagcgaggatccgtacagatgcccgattccgcgttctagggtgtctggctgggaaccgtggtagataggtaaatctactttgattcccgggattatcagacgccccatctcggggacgatatttagttgttttagatacacctgataggggttgttgtctttggctacccgcgccaaccagggatccaggatgggagcccccggggtgtgctggttatatgcctgcgctgccttaaaagaatcagacagctgctgcctatcaagatatttttctgcttttgagtattcgtaggcgatctggagttggcgggcattgttccattgggttgctaccacggggtataacaacaccgcaatacccgccaacgccaggattacggggatcagagtggaaccgcggctgcgctgaactttgcctttacgctgctcggtggctccgctggttttctctttcttccccaattttcgccttgctatttagtgtcggggagcagggttgctccccgacactttattttagttatgcgcgtacccgattgcgacgagcatagtagtatgctccacccagcaatccggctgccacgatcaggaagagggcaatacccgctccaccggtcagcggcagcttcgagaggatatctgagctctttaccgtgttctggtactcgacctctactggtttgttctgatcagcagcggctttaaccgtggccttatcgaaaccgactttcaccacagagctgcccaactcgtaaccggtaggtgccttagtctgtaccacacacagactattgtcacgtgccgctaggggttctgaactagctactccggctttcaatccggtcgcgattgcggcaccagtggtggaaggatccccggtagcttcatcgtcacaagcatagacgctaaactctgcgtttttattgttgatatcggtttgtccgtccttgttgtttaccagcagcttcgccatcggaatatccggctggtctttaggatcagtttcactgccgccgttttcacctttctccgagtcatagttgtaggctgccttgttcttaataacccacttgctggcgtcttcgctccaaataggatcccctgcggggagaattttaccggtcagagtcactcgcagaaccttgcctgaattggcatccagcttggcaagtccggttttagttagctcgattccgtaggggttttcaataaccgtgtaatcagcagcatctagcgctgtcttggtgtccccatctacaatctcgaccttctcgatcgtagagttggccttatttaccttcagcggaccggaaggagtatcagtgactttgtaggtcttaaacttgtcacctttatctttctcggtcaaagtaggaatcggggagtcaatctcgaaggtcatcttggaaccaggtttaatcacctggtctttagcggtgatgtccttcttagtgatcttcccagcggaaccgttcttggggtaaacggtcacggtatccatccaagttccggattcgggatcggtcatcggaatcagaatcaaggacgggagcgccgccttgtaaccggtaggagccttggtttgggtcaaacgatacaacccgggcttgacggtaaacgaagtcttgccatcggcacccaagtctttcgtttcttcaactgccgggctcgccggagtgaaggtagcggcagtcgctgcagtggccgcattgtaaccagcggtagtggttacatcgtagttacctttttccagcttgaaagtacccgagggcagtttcttgctgtcgtcaaacttaccgctcttgccgtcagctttaactccggattcaccagtctgcggctctaccgaaatcgtgtaatctttgctggcatcgatcgcgggggcagcgctggcgccaggcgcgccgactgctaccaagcccagggcagccatgcccaaggcggcagctagtgccatccccctccgaacaaatttcttagtgttggaaaacatttttacctcatttatgtttttctgtttatttacgtttggaaattttcttaacttctttgttttaagatgtttgcgcgttaccccctgttaacccggggtcggtgccggaccggaaaaatctttcacgagctaaagactgtctccaggcggcaagcatccatcccgcgggtaagcgtggcaggcacgcgcggtgaattattttcattcgcgcctcctatgccacatcacggctgccgaagcggccaccagggagattcccaccagccacaaccagggcaaatagccgccggttagcgggagattcccaactcttacgtccgccaattcgatctgccaagccttgacggtattgtccggcgcataggtggctatcagaccagaactcttggcttccggatcgagcttaactgcggtgtcttgctccgctttctgatcggcaggatctagggcgacggcaaacttccatccgaaggggaacctttcgcccgcattcttgccggcattggtgttccccagcagatagttgccaggtggcagttcggtcttcgattcatacacacccgactggccctcaactggcaccagctcgatcggcgtcccggcactttcgtctgcgtttctctcatatagggagaaggtagcatccggcaccacctgtccgttaggcttgggagccgttgccttatagatacgcactttggtgccattgctgtaaaccgtgtacagcaccacgccctgtttggtggttccatccaaagtaatctcaaaagtgcccttgccgggatccgtatccttaactgccagcttggtcttgttagcttgggagaaatccatgttgtcatagaaatagaatcccagtttatccacgtcccaaggcacccagttgcctgccactttcaggtacggtttcgccgaagtatccggtttggtaccagtcagcttgcaggtggtacccaccggcaccagcggaagctgcgcaaagttgccgcgccctgcctcggcggtaccggctatcgcaggatagcccccatcgggtgccggcaaaccagccgggcgagtacaggtgtagttgtacgcgtacttgttggtttccggcagcacctcatcgcggcgcttgccctctactgcggtacctatctgatattgatcgaaaggcaccagatagaagtcctcgaaggtaatagtggtttccttcttgccttcggggtccagactgagcggggtgacctttaagacacccggggtttgcgagttgcccaatgcctcagtttgctcagtagccccctcggttactactttggcactggggttcaagtacacctgcggattcgtgtacttggcaaccgggtctttctcggcctggttttcatgccagatcttacaagtggagctggcgggcacgaagttaccgccgtcctcaccggagagcaaggtgagttcaccagtgctcaaggtggtcttgtcgttagcgctcagatccatcgagccctcgtacactttgggattgccctggtcatctcgcagatacttatcggtgcattgatagtgcgccttgtagccaacttcccctttatcgaccagggcttgacccacggacatataggaggccgcatcatcttttcgcaccttctgcaccacttttagtttggcggcaggacgcacgaaatcgttattgatggtaaagagggattgtttttgtgtactcccctggccactcacatgattggggtgcacaatgaagcccacaattccctggtcaccactcattagattcaggttagaatcatcatctacctgcgaattttttcctttgttatagctgaatagacccctcaatccggcagcatctgcggtctgcgtgtcttgggttggatccttctcaatggtggtagtcaccttggcatccagctctgggaacttttcctctgccaaaacgcagcgatacccgactggaatcagctggttggcgacggcatcctcccactttccaggctcagtggcactttctttaaagctcaacgccactctaataatggcggcggcgctactatcgggaggcaactccgcgtctccggctccaattaggggcggcggcccgcagtagaggcgagcgtcaaaggtcttgcctctagctaagggcgccccattgccggtattagttaaactcactttcacctgggttttttcgaagacatagttattccaagaaaccatagcgccggcaaagttctcgggcagggtgctgggaactaccggattacggggatccccattcgcatcttttaagttgtccccgacagtcgggttatggggatcattgggtataaatgcttcgtttttccctgcttttttgtcacgcggcaagagcaccttaacctgaatctctccgcccacattttcggcgcggcacttatcggaagcatccgtgcacttttcgtttccttcgcggtcacgaccgcggtatccattggtaatctcccaatagtgactccatacagtttcgtctactttggcaccagcggggtcttcagtgacggtacaaaccgcgcccgccggcagggcatcaatcacatgccattcaccctgttggaaacgacccatttcagtgctggcactgggatgcagattgctctctttcagcctagaaggcaagtcattgccgaaagtagcttgggcatcggtattcagcccaatgtcacggggtgcggggatattgatgggctttccattcaaggagcaagaccagctcaccgggaagtgcttatcaccagaaacaatagttacgccctcgccgccgactttcttcttcaggttgaaagtcgccaactgcaagcggtaatccctctgcaaagcgatgctttggccatcagcagacgtccactgataactatatttgtccgcgctggctgtgcccccggcacctgtccaggccggatcctgcaaatcggttccaggaatcttcaaagtcgcttcgttggtggtagccgtacagtcccaattggcgggtacttccaggggcgtaacggtacccccattagacagttctggtgagaaggttgccgtagatgttaccgcgccatttttgtactggcatttaacctcaagaggaaccttggtgctatcagcatcattgggggcaatccccaggacggcttgacgccattcgtccggaacagtaatccggtcgccgttggcggtactattagcatccttggaagtccacatgctggagtgagcagccagatttaccgtggtggtcttggccttagcccataggcgaataaccacgctaacgctgccactgccactaggagaagtgaattgggtgttgatagggcctgcatttgcctggttgatatcatcaacattcgcccacttccaatctattctgccttctaaatcggcaagcggagcctccacccggcaatccgaaccctcagggatattagtggaatcaacaatggtgctagtaccattcttcaaatcaagcgtgacgggtacgggcgctctgtccgttccgccatttgtgcatttaacctgtgcgtccaaagtatcgggaatctttaacgcatcatactggggacgagatttcaccagcccctgtaccgaaatctcacccgagcctggcagcgaatacttggtttccaaattggcggtagatccgctttcggtgatcgtcaccgtctgtggaggagcctggtacctaacattcaatcccgcaatgtcttgcggctctgactgaatggtgcactgggaaccaaccggcagattttccaaagacttggaagttttttcgttgccatttgccgggataactaactcattgactgtctgccccgcctctcccggcagcttacaggacaccgtaactttattgttcttaccttttatggtggactgcatggcggaatccggggtcggtgacccccaggctatcttatggtttatagccaggttagccagcttataactaaggtcgttcttgacgttaaccggagtttcaatcgtggtgtcagttatggtggtgctgattggacccggcatcaccagctgggcgttgggcacagcagcgggagctccgatcgaatcctcggtaagatcacatctaaccccggccggcaccttttccactagcttagactcggtggacttaacaccaaagcttgcggtgtcttggccgtcaatcggcacggtaactccctcgtcggtgcatttcaggtgcatggggaagtcctggccaataccctgactggcggcctcgccggtcagctctttagttacccgcaacttgccttccaagcgctgtaaatcctcggttatgttaataatttgtttgccgggagagtgtacccagaagtagttgttgctgcaggctttaggagttgtgggtttgctatcgtggtctgcctgacagatagtagattcgtaactgtccctcacgactacgccggggatatttaccgactcgcccacatcggtaccaggtccgtgaatgttctggttcgggggaaccgttgaaagtaaacagtgagtaccgaccggccaggcatccttgccgtttttatcctgtcccaggataactttggcggtaccatcgggtttcactcctacccagtcgactcctacgtagccgggataggttccggtatttgtttccggcaactcggggagcttagtggggtcagccatgaaccgacagttatagtacactggaacctttttaggtaatttgccctctgcgatttttttcgccaatgcgggatcattcttggagttagagaaatgcagggtaacttccacgtgcgctcgcagggagttatacacagtatgcgaaaccagctgcgagtctttttcggtggtgacagtgggatcctgaagcttgattttacccacgatgatattctttaccgactgcttttgatcttttattttctgggtttgagcctcgtctaccgcaaagttagttccaataaaatagctgtcagaagtaaatttcatactcgcggtagtgacgtcatacccctcgggcatctcgatggtttccgtgatagtacactgggtacctactggaactggcgtcggagttatttgaagtttgcccagcttggcgataatgttcaactctttaacttgttggggaccagcgaccgtggggggaacaacatattcatccggcttatctcccaggggatctttacactcccatttataggagtatttggcgccattagtgtagtgaggaggcttgcctccgacttcgtaacgaatctgatcattaactgttgaaacggtcttttcgaaggtcaacttttgcagcgggcgcgaataagtcgcacacttaatcgagaaaagctcactaatcttattcgcagggatcttaaacccgacgcgctcgtgcgcgggatcatttatctcttcaggcgtgaaaacttcggaatctccagtggctctactcaaaccttggcagcggacgttcttcccattaagcttggtgtgccagtattcagtggtatgccgggggaaagtaacatccaccccgccggtcatctttgccttagtaagactgattaccacccgaccatctttaccggtggtatagtactgcgactttacggaagtatctgttggggtaaagtcgattctttgaccagcattgggttttacatagcggaaatcctggtctaccagatcggaagttagcgaaaggtgggtatcctcccacatccaacggcgcatggtttgttcaaaagtgccgttggcaatgccatccttcgtatttgtcttgtaatattctccatttttatcaaaccaaccatttggttgattggagttattatcgtggttaaattcaatatattggtaattaggactgtcctgtttagggtcagctacaccagttagagcgcgcaagaaggcggcacgggtattaaaattcttaacccaggttcccatgcccatagtgcgaatatcgccgccgaggttgcgaatccgccgggcaacatctagcataccgagacgaccagggttagcggtcaaaggaaaatcattgaacttccacgcgtgatcatcttcgctatctttattgtcggggtcgtcaacaaagttcttggagggagtatcaagatctttacttatcaaatcctggttaagttgatcctcgtcggactccccatccacatagtggttaatttgccaaacatccttgttccggttataaatcgatttactgagatgccagtgggggtcggacaccgacataataataatcttggaatagagaggtcggggctcgaaatcggggtcgcccgcatgctcttttaattgttgctgccggtaacgcagcatatccatgtagagcttacccagcccccactcgctattgccaccaaacttagtggctaaattcccgcccttgccgttggtggcatccaaagaccagactttattcattaccttgttatatccagcctcatctgccagagaggtggcttgcaagtcgggagtgttattcccccaggcgccctcgtcttgtttacgggcgtagtggtagatacctatagacagcggggagccttttagcttctcaattacattcgctactgcccggttttgatcccagttacggcacttgccgtcgcttagacgcttacggctatctggtattgcgtcgccgtaatccctagggcaaggagtgttccagttggtaccaggaaccgccccacccatggtttggtatccatagaatgaccccatctcgaatactaaggcaatagaaccagcgctcttgatatcctgggattccgcttcccgaggaggatccgagggccaggggtcatccgcaccgccaatgatcgggtgagccgggtcagagggttctgcctgcgctttagggagcgccaataccgccaccggaatcaacgcgagcaccagccccaagagggtcagcaccgcggtgagcttttgatatcgcttatgtcctgccacgttgcacctaacaatcctagtaaaactacgccccccccgggttacccggcaagggggcgagcaagatacctttggaactaatcctaaattacagttagttaacccgtcaagcactttttatgaatacgtgcagctcgctcacatcatgagacgataaaaaatcgcgccccgagaggtatctctcggggcgcgatttaaactaaaaggttagtttacagatcgatcttggttacacgaccagaaccaacggtgcggccaccttcacgaatagcgaagcccaggccgatttccatagcgatcggctgaatgagctccaccgagatttcggtggtgtcgccgggcataaccatttccttgccctcgggcagggtgataacgccggtgacgtcggtggtacggaagtagaactggggacggtagccagagtagaagctcttgtggcggccaccctcgtccttcttcaagatgtagacctgaccctcaaacttggtgtgagtggtgatcgaaccgggctctactacaacctggccacgctccacgtcttcacgcttggtgccacgcagcaacagaccggtgttgtcgccagcctcggcctgatccatcgacttgtggaaggtctcgataccggtaacggtggtcttctgcggtgcgcggatacccaggatttccacctcggagttgagcgggagcttaccgcgctccacacgaccggtaactacggtgccacgaccggtaatggtgaagacgtcctcgatcggcatcaagaacggcttatccaggtcacgaaccggttccggaatgtactcgtcaaccgcttccatcagtttctgaatctggccaacccacttctcgtcgccttctagcgccttcaaagcggatacccggatgaccggggcgttatccccatcgaagtcctggctggacagcaggtcgcggcattcttcctcgaccagttccagcatttcttcgtcgtcaaccatgtcgcacttgttcagcgcaaccagaatggcgggaacgcccacctgacgagcgagcagtacgtgctcacgggtctgcgccatggggccgtcagttgcggcaaccaccaggatcgcgccgtccatctgagctgcgccggtaatcatgttcttgatgtagtcggcgtgaccgggggcgtctacgtgtgcgtagtgacgcttctcggtctggtattccacgtgggaaacgttaatggtaatcccgcgttcacgttcttccggagcgttgtctacgtcctcgaaaggagtgaaatcgttcagttccggataggtgtcgtgcagcactttggtgatagccgcggtcaaggtggtcttgccgtggtcaacgtgcccaatagtaccaatgttaacgtgcggtttattccgctcgtacttagccttagccacttaatgtcctcctggactcgggtagttatctatcgcttggttgtcaaagtaaaggttaacacccaacgcgaatgatctcctacgggtttttctgtgatttttaacaaaataaaggcacccgcgagggctattcgcctcgggtctttgcaatgatttcctcagcaactgagcgggggacctcatcgtagctgtcaaactgcatggtgtaaacggcgcgaccctgcgtctttgaacgcaagtcacccacatacccaaacatttccgacagcggaacctttgcccggacttccttcactccattgacatcgtccatggactgaataaatccgcggcgagaggaaagatcgcccatcacgtcgcccatatactcttccggagtccggacctctacggccataatcggctccagcaaagtgggcttagcgcggcgagcgccctccctcaaaaccatgttaccggcaatcttgaatgccatttctgaagagtcgacgtcatggtaagcaccatccgtcagggtcgctttgataccggttaaaggataaccagccaaaacgccaccctccatggcttctcgaatgccctggtctaccgaaggaatgtattcacgaggaatacgtccgccggtaatcttattaacaaactcgtacggttcttccgcatccgtgggaagcggctcgaaagtaaccagtacctttgcgaactggccagaaccaccggtctgtttcttgtgggtgtattccacatcctcgaccgtcttgcggatggtttcgcgataggcaaccatgggcgcgcccacgtttgcttccacgtggaactcgcgtttcatccggtcaactagcacgtccaggtgcagctcgcccataccgccaatcacggtctggccggtctcgtcatctagacgcacggtgaaggtcgggtcttcttctgccaggcgctgaatcgcaattcccagtttctcctggtcagccttggtcttcggctcgatggccacgtgaataaccggatctgggaagttcatcgactccagaactaccggctgatcactctcacacaaggtgtcgccagtggtggtgtccttcaaacccacaaaggcgtaaatgttaccagcgtgcgcaacctcaatcggattttccttattggagtgcatctggaaaatcttgcctacgcgctcacgccgtcccttggtggcattcagcagcggggagcccgccttgatgtgtccggagtaaatccgaacataggtcagcttgccatagaacgggtgcgcggcaatcttaaatgccagcgccgccaagtgggcgttctcgtccggaggacaaagaatttcttcttcctcgttattggggctgtgtccttccagcggcggtacatccagcggggaaggcaggtaacgcaaaaccccatctagaaccggctgtacgcccttgttcttgaacgcgctgcccgcaaacaccgggtagatttcgctcttcaaagtgagttcgcgaataccggcaataatctgatcgttggtgagctcaccgttttctaggtaagcctccatcaattcgtcattggcttccgccgctgcgtcaatcagtttctcgcggtattcttcagcgcgatctttaagatcagcggggatttcaccatattcgagaaccgcacccaaagtggggtcaccctcggatactttcgcgcccttcttattggcctctgcggcctgctcggcactaaaggtttccgggaagtaaacagcccgcatttccagcaggtcaacgattcccttgaactcggcctcggcgccaatcggcagtaccatcactaccggcttggcatgcagacgatcctcgatggttttcaccgagtagtagaaatcagcacccagtttgtccatcttgttgacgaagcaaatacggggcacgtcatacttgtcggcctgacgccatacggtttcagactggggttctacaccctctttaccgtcaaatacggccacggcaccatcgaggacgcgcagggagcgctctacctctacggtaaagtcaacgtgaccaggggtgtcaatgatgttgatctgttgatcatgccaaaaacaggtggtcgccgcggaggtaatggtaatcccgcgttccttttcctgttccatccagtccatggttccggcaccatcgtgggtttccccgatcttgtagttgatgcccgtgtagtacaggatgcgttcggttacagtggttttaccagcatcaatgtgagccatgatgccgatgttgcgaaccttagataggtcagcaagcacttctaatgccacaattgttccttccggttagagttaccagcggtagtgagcgaaagccttgttggactccgccatcttgtgcatgtcttcacgacgcttcaccgcagcacccaggccgttggaagcatccataatttcgttcatgaggcgttcggtcatggtcttttcgcggcgctgcctagaaaagtcaaccaaccaacgcagcgccaaggtggtcgcccgggagggacgaacctccaccggcacctggtaggtggcgccaccgacgcggcgagaacgcacttccagagcggggcgaacattttccaaagcgcgctttagcacgctaaccggatcctgttcggtacgctcacgcacgccctcgagcgcgccgtaaacaatacgttccgccaaagctttcttgccgtctagcagaacccgattcaccaactgggtgacgatggtcgagccgtaaaccggatctaccgccaaagggcgcttgggagctggacctttacgaggcatactacttcttctccttcttcgcgccgtacttagaccggccctggccacggtcacgcacaccctgggtgtcaagcgcgccgcgcacgatgtggaaacgcacaccgggcaggtcctttacacgcccaccgcgcactagcacgatggagtgttcttgcagattatgtccctcaccggggatgtaagcggtcacttcaatgccgctggacaggcgaacacgcgccactttccgcagtgccgagttcggcttcttcggggtggtggtgtaaacacgagtgcaaacgccgcggcgctggggcgagccctttaacgcgcgagttttactcttcgccttcttagttgagcgtcctttgcggaccaactgttggatggtaggcactacttctcctgttactgaatgtcgaaacacttgccacgcggtaccgaaatatcggccccagaaacgggcatactgcaccgccggggccggcccgcaaggttaaggctgcataggatgctggccttggtaatcagcggatcgcgcctaactgacttacccttaacgtccggagctcaacggagaagagcccgtgccagaaaaatctggctagttcggggcccggtatcgcgggcaccatgattaaaattagccagccaccctgtcgctggtcaaaccggattagcaaataaaagcccttttgtgactgattccatgagtaaagctccgattttaggatcctgcgtcaatattacaggcgggttcgtgtcggctcgattcctggcttattatgaggaatcgtgtgttcatctagcctgcccgcgagcgaagttttgcaataccgcgtatccaggcttcgcaatcgcgagtgcagctttgagcaggtatttgagcttttagagcaaaatcagcatttgctttcacctgccacagctgagtgccgcacccttacggtttggagcggcaagcggctcaagttggcgggtttaggaatagcttggaaggcctgctttagcggcgaaaatgctttttctgcagccgaggacgcctggcgagggctgtgtgaaagcagccaagacgctgctgggggcgaagacgaaaatcccgctttagctgcggaatctcgacaggcgacaacgagagaaaactgctgttcagaaccgggaaatactcgcagttcagaacctgagaaaataagctggccgctggttttaggcagtttcgggtttacgcccgctaccccctcgctgctgctagttccagctttagcggtggtttccagtggcggtaacacttggctgtggcaagctcgctttcaggcagggcaagaagatttccgaggacgccggggaaattccggcgcaactgccgataatgtgcaaaaggcggcagggaccaataaggaagaagcccaaagcgatgcctcgggcaataacgcggaagcaacagaaaacacgcaggttggcgacccttccttgcgctcttgccccgcgcgaaataccaacgtagcaattccccggcaaccatccccgctatccccttccgatcccgcgcaggtagttagcgaaacgtatccgcacttgcagccggatgcatggatggcggcagtggggcgcgcgtccgcggaaattcgcgccgggcgagcagaaaaaatcgtacttgccctcgaccgggaactacgcttttaccaggatgtttccttggtgcgggttaccaaatacttggctgaaacctaccccacctgctggacttatgcgattggtgacctggtgggagccagccccgagatgctcgccagcgtaagcgaagggaagctgctgtgccgcgtcctcgcgggctcggccgttccctcccaggaacaacgcttgctaggcgatcctaaagagcaacttgagcaccggttggcagttcaaagcgccgaagattcgctaactggacttgacttagatttagaggtgcctgctccccgcttgctgcacctgggatacgttacgcatttggcgaccgatattaccgctgaaaaccttgctgatcagggcgttacgtctctgcgtgcagcggcggcacttcaccccacggcagcggtttgcggaaagccccgcgaagtagctgccgcgcgtctggctgcgctagagaatatggatcggggtcgttacgccgccccgattggatggatggatgctgccggcgagggcgaatgggcaattgctttgcggtgcgccgagcgcgacccggctcgcgcagacacttatcgcctgattgctggcgctgggatcatggcagattccgatccgcagcgcgagctggccgaaaccgaaaccaaaatgtcacccatgcgccgcgccctccaggcgtaaacgaagttaaagggcagctaactcgcgggcgatttccgattccaaagcagcgcggcgagagcgtaaatccggcaaataagcgttaatttccacgatttcacggcgcggggtttcgcaaagaatcgcttttagttcttctatgtcttgggcgcagcggtgatcccaacccaggccggcagccagcgcggaaagatcgaaatgctggggtgtcaagaagtagcgctcgaagatttcctggtcactagccgcaccgtgttcgagggtggcgaagatgcgtcctcccccatcgttaagtgccagcacctgcacagtgggcgcgtcctccaactgcccagtgagcaacccggttagatcatgtagacaggtcaggtccccggctatcagccgcaccgcgcgcccggtgccagcagccagtcccgaggcagtcgcgatatttccatcaatgcctgccaggccgcgattcgcgcaataggtaatgccgcggtcaccgcgcgccgccagatcaaaagcacgaatcgtgttggaggcaccgagcatagtcagcggaggggcacaggaggcagtcacctttttcccctccggttgtgtcagcacgctattgccactccccgagcggccctcatcatcggcatccctcacactatcggtgctggtcaggtggttaacgcctttttcgctagtttcccgagaggtatcggggtcacgattaacccactcctcatagacgtcctcgtaaatacgggcgagggcataaggatctatccccatttccagttctcgcaggttatcccccatttccggggtatcttcgggagtggccatgcggaggcggtgggcaacttcgttcgcggtttgtccgccttcgttcgaggtagcgaaaacatgattttttattgcttccgaaggggttgcctgcgcagctactacttgcggaagttcacgggaatccagtgcagcatagttggcgttttgccaaaccgtgaccgcgcgtcgatctacacagcggcggtaggcgcgctcgactgctttcgcggcctcgcgccaacgcgccagccagctaggactggaggtcgccgggaaaaccttatccacttgcccgggggtggtagctatatattttccggtcaggttagttctcgcccccaggctaggcaagcggtaaatcgggatatcccctcgggaaagcagggaacttaccggacgcgacaaagtggcgtgaccggctataatcacctgctcaacttcaccggtgagggcggggagcacttgcgccgcgtgcgcgatctgcaccggattgccggggagcaaagtcaccgtcggttctgccaacaccggcagtccccatgcttgcgccgcctctgcgacctgcgggaggcattgatccgctaaaaccaccaccgtttttgcgatttttcggggagcttctccctcaccctcgaccactaactgtatttttaggcggttttccgaggaaggcgcggttgcagcttcgtcagcagcaagaccttgcagctcggcaggaatctgccagctgctggagctgactaagggtggcgcgaaacatagattcaactgcaacgggcatagttgcccgcgtttttcggcacccgcaccccaagccttatcaaaggcatcgctaagactttcttttaccgtatccaggccatcctcgctggcgtcaatatctagcgccaccggacaggctggctcaaaaattccttgctgccaggtagtttgattcgcgccagttccgcgagcggagcgggggcgatcagcggtcacagcaaccaacggaattccgcagtggaaggcttctagcattcccgcatgcaactcggcgactgcagtccccgaggtcactaccagagctaccggggtgtaggccgcgtcctcaccctgatatattccggatttcgccagccccaaagcgaagaaagccgcagagcgttcatcgaggcgaacatgggtgcggactacccctgcctgtgctaacgctgccaaagcataggtgagaggcgcggatcgggagccgggggaaatcacgaaatcgcgcactccggcgcgcaccaactcgctaactgccagccgcgccaaggcggtggccgattctaggttttctccgaccggatccggtattttttgggagcaaccagggggagtggaggggaaaggaacgtcactcacctactagcgacctccgccacatctcgcattcgctgagcccaacgtttaaccaggtcgcgacggtcatcattgtcgggagcggaaattaaatcggtatttatttctacttcctgcacctctagctgaccgtctttgacctgccaaggctgacgggaaacatcggatttaagtagctggctggtcgccaggccgcaggcatggggaagctgcgccatcgcggcggcggcgcgcacccccagtccgataccgactgcgctatcgaccgcggaagaaaccaccacgtccatgccacgttcattagctttttccgctaaatcaataaccgcggatactccccccaagggttggattttcaccaccatcacatcggcgcaatctgctggcaggtcagcgagaggatccggggagcggcgaatcaactcatcgaccgcgagcggcaccgaagtggcggcacgtaactccagcatttcttcggcactcttacagggctgctccacatattccaaaccgccggccgcctcgtctaaggcggcgatcgcggttttagcttccgccagattccacgcgccattagcgtctacccggatccgataatccccaccgaactggttttcgagggcggtgcgtactgctttcacccgctgaacgtcatcggcaagttcggtaccccgatctgcaactttaattttcgcggtccggcatccgccgctttgctctacgatttgctgggcgcgccccggggaaaccaccggtacagtcacgttcacgggaacgctggctcgcaccgggtctggcagctcttcggtcagggcattaaccgttgaccaaagccaacgtttggattcgtgcggaccataatcccagaacggcgcgaactcaccccaacgattccccgagcgcaataacacgccttcgcgcacgattatccggcggaaacggtttactagaggcagggaataaactagcgcctggtcgatttcaatcggggggaactcggaattatcaaaaaggctactgaggtcgctgacttgcgaagccggtacctcaactagcattggagtgctgatgtttcctgccattactttcccttaaaacctcgtattatcgttttacttccgaaaacgatactttttcgcttaccactgcctatttcggtctttctacttcctattgtgggtctatttgccctgaaaaacctaatagtagtaggggaaggttgaccaatccggttcccggtgctccaagaaagcgcgccgcccctcctcggcttcatcggtagtgtaagccaggcgagtagcctcccctgcgaataactgttggcctagtaaaccatcatctgccaggttaaacgcatattttagcatccggatagcctgcggggatttacgggcaatagtcagcgcccactctaaggccacggtttctagctgctggtgtggaactgccgcgttgaccactccccaatctgccgcttgccgggcatcataggtgttcgccaggtaaaagatttgccgggcgcgtttgtccccgacttgccgcgccaggagcgccgaaccgtatccggcatcaaagctgcccacattcgcgtcggtttgtttaaaccgggcatgttcctggctggccagcgccaaatcacacaccaccactagagagtgtccgcccccggcagcccaccccggaaccgcggcgattaccggtttaggcatcgagcgaatcagacgttggacttccaagatgtgcagtcgtccggtacgcgccagatccaggttttggcggcgctgggaaacttccgcgtccggatcggctccctgctgctcgtaacgatagccaccccggtcacgaatccgctggtcgccaccggaacaaaaactgtatcctccatcggagtcgctaggaccattcccagttaagatcaccgccgccacatcggcggcgctgcgcgcatattccaggcaagccagcagctcatctacggtatgcggacggaaagcattgcgcacctggggacggtcaaaggcaatccgcaaaaccggcagcttctccccattttccccgcaatcagccaattcggtggccgcaaagtcattaagctgatagcggtcgcgccccggcttatagggtttttgcttctcctgagcttcagatgaggacgaggacgcggaggcattcgcacttcccgctttcaccaccgcccgatgaaaagtcaggtcagttagcttttcaaagccgggaactggaatccaccgttgctcatcgaaagtgtcagaaacatgttcaagctggctcatactcccaccctaccccgagcacggttaccaagtttcccgcagttgtccgcgcaaggcaagaagtttttcctcgcgttctgtgcgcgggaagagaagtttttcctcccgcattattccgcgcggagcctaggtttttcctcccgcccaagaaattcggaaaacgtagcggcgttttccgaattcttatgcccaccgcacccactcggataaaacctaggctccacgctcgctggtaccgcctgcgtaaggggcgcaggggaaaaagctgccggaagatgcgcactgagcgtgcgggggcggatttatgccgaggggtaggcttcgggccttaaatccgtgaaaatgccagagcattttccggatttcggggcgcgaggcaaaatccgcccctgtgcgcggacgcctatgggaggaaaacttctttccttgcgcttgaattgggatcgcaggaactggcgatagactgggcgctgacggctattttcggaggttggctttgcgcattgttcccccaccgagcacggacgctcgggcagccagcgaagttttagctcctcaaagcggtaatagcaataaagatttccagattgacaaagaagaaaatgctccgcagatcgtctggttgcaaagcgaaccgaacgtagaggaaagacaagaaggaaaaaccacggattcggcctcgcgcccgcggccgctgattttcctgccggtctccgataatcccgcgcgcgataccttattctttaccgcgctgcgcaccgccctctggccggacaaatttacttccctacccactcttgatttgtcggcagttgccgggccggcgaaacccttttttgcgctgcggatcctggcagattaccacccgatatttttcccagcgcgcaccgagcatctgtcctgctcttgggctcgccagcaagcattgcggctgcagcgcctgcctgaacaggtaagttttattctttcgacttccggttctaccaagcccggagggcgcctggtggggatttcgctggcggctttgcgcgcttcccatcaggcaaccgcccagcgcctcgggggtgccggcctctgggtgtcgtcgctccctcgggatcatattgccggtttccaagtgattgcccgtgcctacgcggggggaactgagccggtaactatcgatatgaccggtggttttaagctctctcgcctgcggcaggctctggaaaatatttcctcggcgggcgtcccgatttatctatcgctagttcccactcagctgacccgcgccctcgccgatccagaaaccctcgcggctctgcgcctttgctctgcgattctggtgggcggggcgcgtatctcgccctcgttgcttaccgccgggcgcgaacaggggttgaacctggtcaccacctatgggatgaccgagacttgcgggggctgcgtctatgacggtgttcccctgccgggagtcaaagctgcggttaacgagggcaggatttggctgtgtacccccactttgatgagcggatatttagaggcagaatcagatcctgaaatccgcgaactttcgggtacaacctggctggctaccaatgatgcgggcagaatcatttttgaggacaaggagacgagcgcgagaaccgaagatgacactttctcgggatccgaatcgagtaacctgcaaactttcagctctccgggagtggaatccaccagcagacaggctcaactagcagcaagcgagaacacttcgcttgagcaaagcagcgcggatttaaggcccaataaaccacctcgggaagaagtagacatcatcgactcgtctagccgagctcacctagaggtgttaggtcgtctagatgacaccattatttccggcggggaaaatatctccctacccctggtgacccgggcggcggaacaggcgggatatgggggaatagagttctgcgggctagcagatgatgaatggggacagatactctgcgcggttttttcggcagcctctttacccgccgcggaacccgatgatgcccgaaaccttgcccatttaggccaggagctacgcgaagccctcagaaaacagttaccaccctcgcatctgccccgcgcggtggcgctgctcccccacctccccctactgcccagcggaaaattagatcaccgcgccttgcaagcggatgcgcgcgccgccgatagagaaaaccgcacctggcgcaaataatacgcaaataaaagggctaatgcccaaactggcattagcccaaaataagtagaggcggcgaggaaaaccccgccgcctctaaacctaaagtttcctttagccttttagtacctggtgcaaggccgccaaatccagcgccctgtcaccagataggctccaatcatcgccagccgggatcgccttcacccgcgcaggggttggaatcctgttgaacattgctattttgctgttgattgttgctagattgcgattgttgcttcggagcaggcgggttgtaattctgagttttcgactgctgcgcattcttttgcgctgcagcctgctcagctgctgcttgttccgctgcagctttttctgctgcctctttcttctccgcagcttccttttctgctgcttccttataggcttgagctttttctgccgccgcctttagagccttctgagattctagagtgttaaacttttcgcccttcttggtttcgcccgcgaaataaaccaaatcggattcagcatcgaagcgcagttctgatttctctaaagttgccagggtttctatcggaagctgattaacctcatgtttttcttcttcagagaagctcagcgacagatcaataagatgccgctcatttactttcgccgcattcggatcgccatctttttccaccgcatctttggtgtctttcttgtattttgcgggaatattgagttcagctagcctcttgttcataaactctgaacctttagaaaaatctagtttagagaactcaccctcacctgattgccgaatagaaacttctttaatcgacttaccggttttgttccttaataaggttttaattgcacctttgccagtcttgccaataaccacgctggcagtctgttcctcttgcggagcttttgctttcttggaatcactggcggagcatccagtgaaagcaaacattagacctaaagcgctcaacaccaaaacaatttttttagcgctacttctaagcatagacaccatttctagcctttctaaacgttcctaaactcaattttttattatctaacattttgggaaagtatcctatcggctctcccaattcatctacatttagttgctattttccctgtattttagctatttccttagcttccagcccaaaatctttgctaaccgcatagattttgatatccgcacctttgggaacctcggcttctggaaggtagaaccgatatccaaagtcattaacgattcggtgagaatcgttaataaccgaccgtctgtatccacggtaatcgcgcacctgggagtccttccccggcatcgtcaccctcgcaaacacttctacatcagcttgacgataccgggcgggaatagttccatcgatcaccttaaatattccgtttttcttgaaactagccttggtcttacctgcggtgtcaatcaatttatagggagcaagcgtactcggagggctagtcatcgccggcggatccgtagcgaaaaatggaatcaacctttcggctcgctctaccaccaagatgtctggttctaaggaaaaagcgtaggtagcatcgtagggaatcagcttggaatagtgggcactagcgaaactcggggaaagcaccggtaccagtgagttgccgaaagagtctcggaacataaaaagatcctctttcccctgccccctcgtttcgaaaagatccgcggtggtatccggcttatcacccaggtacctccagagattaccttggaaatcctggaggtcatttattccttccgcccgccagttcggttcgctcaccgtggaggtaggatcctgcatcctctcgatgtcacctacgaatccttcacccagtttccattgtggatttttagccaggttctccacctgcaactggtctagcagatagtcggcaccgctatatgctcccttgtaactccagtgagtgtcggttttttgataaagaacttccttactgcttttcagctttttcgtgagatccacgtagggaacgcccagggaacctaatctgttctgcaaacggtttagattagattgctcaaaatttcctgcccggtaacgactgggcatgaattgcccataaagggtgttcttattgggcgctaacgccaccgcaaacttgatgccctgcgcctgcgcctggtcacccagaatctttaggttggtggccgcattgtcgattccgcgcgaagaaagtcgatttactccccgatagtcatcgagcgaatctgcgtaaaacaggtaaccatttttaccaataactacctgatcggtaagtgcggacgagaatatcccgcttttcaaggtgccggcagctgcgatcatttcccctctaaaaggaaaagttttttccaggtaagtgccggcatcttgtaaatagttgacatttaactctccggaagacttagttagggagggcgccgcaacctttgcttcttgcgagggctcttgccattttttatagggagcaggtgtgaaactgcgggaatcaacatcaggcacaaaccaagggtcacaaaggttagcattaggctgctctttgcccaccgcgctaccgaggcatttttttcctcggatgaaccgttgttttcagtcatagttacttcctgcacctcctagaacctgaaataaatgaaggggtggtagccgccggctgccaagatcagcaggttagctgctagcagcaccagggttagacccaggctccacactcgggtatctacagtagccggcatataggtcgaggaagggttagtgacccccattttcttccatagttttgcttgcggagacaggacttgagtaaccggaagcatagcaatcagagctatggagaaaatagttagagtccatgggtctaggtaggagaacgccagggatccggctcccacggtggattcggtgttgaaaccaaacatattcgcgtacatttgcagagcttgggtaaagctatctgctctgaacactacgaacgatgctaccaccacgaacatggtgtagaggtgaccggcccagtgcggaagtttcttcaggggcactatttcttcgagcattaaaaatatcccgtggattaacccccagaccacgaaggtccaggcggcaccgtgccacagaccgcagagcaggaacaccgtgaacttgtttataactgttcgcgcttcgcctttgcgatttccgcccaggggaatatagaggtattccaggaaccaggtggataaggaaatatgccaacgacgccaaaactcttgcatggtgcgagagatataggggtaggtgaagttttcttggaatcggaaaccgaacatcgctgccatgccgatggccatatcggagtagccggaaaaatcgaaataaatctggagagcgtagcagatagccgctaaccaggctgcgtaaaaatctacttccccggattggtttccatagatcccatcgactactaccgccaaagaatcagcgactatcacctttttactaagcccgactacgaatctgcgcatcccacaagccactccgttcaaagtgaatgaacgctgcgcaatctgttcttcgatgtgccggtaacgcacgattggtcccgcaataagttgcgggaagaacgagatatagagcatcaccacgaagggatcccgggcggcggagattttcccgcgatacacatctattacgtaggagagcgcctggaaggtataaaaagatatcccgatcggtaaggctactgccccgattttcaggtcgagccctagcaaggaatcgatggttcctacaaacatccctgcgtatttgaagaaccctagcactcctaggttgagaactagcgccagcgtcaagatggcttttcgccctgccgacgctgcgtcctctttcctggtgtccagtgctaatgccagagcccagttcgctagacaggaaaccagcattaacagcacatagatgggttccccgtaggaatagaacaggaggctggctaatatcagcactgcattctttccccttaccgacggaattatcagcgtgaggataaaaaccgtcggtaagaagaaagatatgaagaggacagtgctaaagaccactagttaagggctctcttattggcatcccagtagtagatcggagcgttccagtaggtcttgtagtagaacgcccagccacctttggaactcttgtaggccatgtcttcgtcggtatcgaaaatataggttgtgcccgaaacatcgatttcattccagccgtggggagctcgcgcgttcgccacgtatccgaggcggactctcgctgatggataccctagcgcccgggctatccacttgtaaccggcggcaaagctgtaacagttgcccccaccgttggcgaagaaattcttggcgtattggatatcccagttgcttccccacggatgtgacttcccgtgcgcaccaatatagtgatagttgtttaccacataggcataggatttgtagagggagtcatagcgcccaactatggactctaaggtggcgtctaattgagcatcacccgagccaacgtagttaaagtacattcccttggctcgtaatgccctcaccgtcgagtaaccaacttttccatcagggtaaataccattggctctctggaatgtcttaacacagttttccgtcatccgtccgaaccatctgtccggtgtgaatttacagtaggacggattcagataggtgagcgctgtttgcaacacttctactttataaccgctggaaccatagcccataacactgatgtagttgacaggcggaattatccatactggtattcccgctgcccgcagagctttcgcggttgtcatccctacgcccccgtctggataaattccgtgatccctctggaaagccttcaccgctgcagtagtacgcgccccgaatattgagtcagcgtgaacgcctaggtattgcgggaaatacttgtttaagcccaattgcaaatttctggtaaaactgccacgcgatccggaccagacggtagctctccaccactgctgagagggtgaaggagctgcataaatagtgataggcacacccctgtctttacgcacggcatcggcaaacgccttatctgcaatatttgaatgagatagccctaggtcgccacgaatatcggaaacgcatttagaggttgttgctccaaaaaacgtgtccacccgcggaataacgcaatgctctggataaaatgcggctaggtaaccctgcaagctccgaacgatgggggtgttttgttgcggaaccaaattaaaattagtgttgatagggctagcaatcgcagctctgatgccctgttctctgaacttggccgcagtaagaaaaccatatacaccatctggcctgctaataccaagttttctttgtgcacagtttaaagaagctttagtctttgcaccgaatattccgtctggcttaaaagatccgcattctttgaatttcccaaccaaggttttttgaagatctaacactgcttccgaacgcatgccctgccttaggaagctgccggaaatcaccgagaattgttcttcagaggcatccgcttcttcctcactatcttgagattgcctagaagtaactgtttcacttggcgaactgctttcattttgcgaattgctcacagacgcatctggtgaagcagacggatcctgctgaccacctgcattgttctcggcctcagttgtactgctttccgtattcccctcatttggagcagcgtatgcagtcccctctactccccaggataataagagagcgaaggtggctaacagccccattatccgtttttgattcctgagcaacatgtgtttcgcctcttcatttctctgcagagatgctattacagtgaataagattgtatctaattaaaaatcttaaatccactattacctattgagagtagaacttcattattttttctgcgctgtctaaccccacatccttgagattcaagcgttctaccgcgggatccataagttcaaatgcccacgaaagcgtggcgtcaatatttggagtagcgacccctataagtttgccaagctgggcaatctgagaaagtccaaacgctatatcttccttaaaatagcgcgatgaatagttcaagcgatacccttcaccatctgcaatcataggagaaccgatacctttgaatgcagtaattcccctaatcttagcggtgagttcatcctggttacgagattcgtagtaggcagttaaagaagggactaaatccccacccacactggcgtatcctcgtgcaacttccacaagttctgtgttcatcttgaaaaaatagtccgaagctttactaccccaaccttcatagaagggaatattttcagaaaaagtgttccccggattttgctccgtaatttcacgcaaccgagatgaatgcaatatgggattggacgcacccaaagaaataggcagatacgtgggcatcgtgcgcacaggaacatggaatagttcctgcagcaaatcacgcgctcctgcctgtctggtcagctcagctgctaccagttctttctttacacctgaaagcactgcgcgatcgccgtaaccaaatgagcgggaaatgaacattacccgctgaagaccaactacggctgccccctgtgcgagcaccgggttaacagtaaattctcgagcaccattgcctggagataacacaatggtgtgcctttcggcgagggcgtgttgagcacgattaaagaaatcctgcactgcatagacaggaagtgtcactatgatgacatcggaaaaatcgataagttcagcgggattggaagttacaaacgctaaatttgcggtgtactcctgcgaagaaaccaaatcatgcacgtgtactcgaggtttccatttagctgcttgccgggtgtaaagggcagtttcatgcccatgccgcgccaggtagcctgcatagaccgccccagtatggccgcctccaacaattccaatgcgcatcggttaagctattcctcctaatacttccagcaagcgggcattgtcctgggtggaacgaaccgctagccgaatatattgcttaccgtcaaaaccctctttttcggaaagatcttttatgatcagatcgttttccagacaggcaatagtaagttcctttgagctgtggggagccagcacctccgcggttacaaagttggcttgtgaaggaatcactcgcagatagctaagctggttcagatcttctacgaactgcgccctcaccgcttttattttttctaaggcagctgcgtaatctttctggtatttttcttctatttgcagatagaactcggcaaaagagtttatgttccagatcgacacgtctttcttgaaacctgtgatagctgcagtatccgagctcgctaagattcccagacgcaaaccggcaaccccgtaactcttggaaatggatttcataatgaacaggtgcggatgggaatccaggatttcctggcttagcagtgaattgtcttgaccttcagcaaaatcaatgaaactttcgtcaagaactagagttatcccgttttcttctgcccaatctgccaggcggagtgcatctgcctgggggatgaagttacccgaaggattgtcagggttaatcacaatcagagcttttacccgctctccgctgtcggttttaccttgttcactgcgtccgaaaaactctattaagtcatctgcggtgtaggaaaaatccggattatctgcctggtaaataaccggtttttccgggcagcgattggggtattcctcgaaggtgggtctaactactccgtagggcatcggcagctgcgccattagagatttaattagctctgctgccccgttcccaaccactacttgttcaggccgtaaagcaaaattcttggccgccagtaaagagttaacccccataccagaagggtaatcggccagcaaggaatcaaagttcgctcggatctcgtccttcatccgttgcggagggaaatagggattgaccagatagcagtagtccagcatcttggggtaacgccaatatccgccgtagcgggattcaaatagtttcttgcgctgggcggtatcgggatggaatatcgaggatgcaatatctagatcctgtacatcatcaatctcgtaccacttttgcccatctaggcgtttggcttttattcccggatcatccaggagagtaataacccgcaagacctgttcatagtattcattgcgccccagcgcctgagtataggcatctaagaagggaacataatgcgtggtagagaattctttagagaacttataaatatttaccgtcttgtagtaagaatctatgtcccgataaacaaatttcttgccggggacgaaagcagaaatagtgtcatcgtcatcgagcttgacgaccgtgccatccatccaggactcgtatttatcaactagcgctaaagttttccggggatcatcaagaagatcgtctagtaccctatcttcgaaaatcagatccgactctagcagcagggtgtcctcttctaacagcttatctttggccaaccacaaagagtagatgttattggtctgatcataaatcgggttatcgacgaactctattggggtagaaatatctaaggtttcaatatagtcaatgagcttttggccttcgtaaccagtcacaataactattttcgaaagtgccttagcgtcaagctgatgcagcatccgctcaatcatggttaccccattgactttcaccatgcacttggtgttgtttgcagtgagatctttaagacgggatcccattcctgccgccaaaataagtgcctgcatttgaccagctttctatctatcggtagcttttgttcggtttctgattccccaatcttaccgaatctgacctcttttacctcggcacttatccggcttgtctatgacatagttagacaacaacaataacatttgtaacaatgagaacatgtttacctgcagcaacagaatccgcacacgcgcactggcaatcctggctcttatcgccacctttattgcctttaatggcctaacagccataaccgcacctcaaaaggcggaggcagctccaatcaccgattggcaggccgggtatattatctcggatgccaacttctatacgcagggaaacatgagtgtctcccagatccaaaccttccttaataacaagggtaaatactgcaatggatcgaggtgcctaaaaaattatcgcggcaatcttgcttctttctctgcgggctcttgcccctcagcagttaccggaggcagcaacctatcggcagcggaaatgatttatcgagtgtcacgtgcttgtaaaatctccgcaaaagttttgctggttactttggaaaaagaaaacggtctggtgacttcacccgcctggtataactcccgtaccggcgcgaatgcgtttaggaccgccttggggtacggctgccccgacactgcgccctgtgacgcgcagtatttcggagtaggcaaccagctttatcacgctgcgaaacagttcaatatctataagaaataccccaactactataattttagatccgggaaaacctcgtgggtgggatataacccgagctcggcttgcggaggaagtaacgtctatatgcgcaatgccgctacagccggcctctacaactacaccccctaccaaccgaatgcagctgccttacgggcgggactagggactgggaactcctgcagttcttatggcaaccgcaatttttattacctgtacaaatcatggttcggcagtccccgcgcagcctcaaaacgcacagttacccaggcgcagataaaagccctttcaccagtcatttccgataccgatctcaagagcggaatgtggaacgacaccataaagaaactacaagcagccatgcttttagcagtccccagctacccactctttaccccggacggtgggtacggagctaagaccaccgagattgtgaaacagttccaaagcgagaacggtctttatcccagcggggtggtgaaccaagagacttcctataccctgctgcgtaagggtttcccggtatacgtattcaccccccacacctactacggaactttggggtggggcgcacgtagcgatgctgtaaccacgctacagataggcgcgaaagcgttattcccccagtggtattcagcaggtatagacgggatttatggcgccaagagtacggctttcgtaaaagcattccaaaagtccaagggacttcccgaaagcggaaccgtagacgaggctaccgcgcagcagcttcgcgaagccgggattcctatttccctagtggcggtagcagatcccaaaccgatctacctgcgaagcaccctttggaagggcgcctggaatgatgatgtcctgcaagttcagcgggcactggtaaagaaattcccacgatacgcccagttccaaccggatggcggattcggagccaagaccgaagcggcagttaaagcagttcaacgcgctaacggaatctatccggacggcggcgtcggtcctaaaaccatggaacttttccgaaagaacggaatcgaggcggggatgtttaacgccgctaaatcaactaccgctctgaaccagggagtatggaactcgtcagtgaccactttgcagcaagggctgcgtaagtatttcccggagagtttcccctgctggccggacggtggattcggagctaagaccgaagccggagtaaaggcggtacagaaacatttcggtctgccggaaaccggttttgtagataaggctactgccgatcagttgcgaagcttgggagtgccgctcaccgtttcggctccacctgaggagctcggtcaaactctgaacacacccttgggacagtggcaatggaattctcaggtaatggcgctgcaaaagatactcaagtactacttccccgcgcagactccctacacccctgatggaggttacggagtaggcagcaaagctggaatgatcaaagttcagaacttgctgcgcatcacccctaccggggtatttgatcaggaaactgctgcaaagctgcaggaatacggagttccgctgtcctataagtaaaataatcaaatcggcagcgctagcttgccggcaacccttagccaatttttagatagaggaagccgccgtgaagaagtggttatttttagttgcattcgcagccgttaccttaagcgcctgttcccccgccctgccgcgggaaactccgagcactagcgccagcgccagcgtcagcagcgggcaggccagcattagtaccccagctacaccggatgcaaaatctaagcagccaaaagcctccgaaaagtccgacgccaagactctgcctagttccaaggttaacgctgaccaaaaaactccgcagggtgcagttatgctctacctgaaggcctttgcttccaaggacacagcaacgctttgcaaaacgatcaccacttccacagttaatcgcttagaagccttagggcaagaatgcgaaagcacctatcgggagtcagaggttcccgaacctgcaaaggatctttcaaaattgcaatttcgcaatagtggttccactagcgatggacgcggggtatcggtgctggttacttcggggaaaagcagctactcgtttgtatgcgtagacgaggggggtagctggcacgtagatccggaaagttatactaggaaatagtaaatagcaagaacttctcggctctttttacagccttaacactatgaaaggcgctgctacatgattgcaagcgtgaaacgttggcttcgtacctcccgattaactcgcgacctctaccaacgcctatacgatgtcaagcatcagcgggaagaacgtttagcaaatgcggccctcaaaaacgatggcgctgaagtactggccgacttccaagctctgatgcaaaaactcggtgccgaatggtacttagcatatgggacctgcctaggcgccctccgtaatcatcagttcatatcccatgatctagatatggatttttatctatgccctaagctcggagtcgggatcgaagaagttaagaacgcactttctgcagccggctatcgccaccaccacgattacgaagtggagggaaagactgcagaatgcagctgggaacggaatggggtcaattttgacatttttgttctcgaagagaaaccagagggatatgggtgctatttatttaatcgtttccctgatagttcttacagtcacgagcacgaattttctgtgagcttgagtatggccccacatatcaccgacaaacgtgagatagaccttgcgggagttacagttcccatacctgcaaacgccgaagattttatgaaactttactacggtgaaaattggatagtccccgaccccagctacacttgggaaaacgcgctcccttcgcggaaacgatgcgctaagcgaggatactatagacagtactgaccttattcacgccctacccaggaagtagcatgaaaacttttgagtctctcagtagcccccatatatctgtgggcattgttgctctagatgaagaggattatcttcccgatatgctctcttgcatcaaggctcaagactacccacaccatcttatccaggtggtgctggtagatagcggatctgaagatgccaccccccggattatgaaggactttgccacgcgggcaaccgactttgaatccgtggtgctgctccataacccaggaaagaccgtgccgaaaggatggaacgtctttcttgccgccgcaaccggagatgtaatcgttagggtagacgctcacgctcgcattccagataattttttgagccaaatcatagcggtcttgcgtgaagatgaagcagtagctggtggcccgcgccccacgatcacccctaatagtgccaccgactggcaacgagtattgcataccgtcgaagaatctatgttcggggcttcgatcgcgaaatatcgaggtaagtcaaaatccgactctaacgcacctcagtacgtaaaatcagtattccacccaggataccgccgctcggtgatagataaagtgggtccctttaacgaggagcttacccgcaccgaagacaacgactactcctaccggattcgtaaagccggttataagattcgttttgattcccggatctattctgagcaaataattcgtccttcactgtttgccatgattaggcaaaaatacaataacggctattggataggtaggactcttttcgtacaacccggatgtatcgaggtgtatcacctggtgccgggagcttttgttttagctattgccgcgggattcgcactgcggctacggggagttaagctgccgctgcggctgctagccgccagctatggaaccgccgatctggctttaagcgcggcatcgtttccgaaagttgacccgcccaccagtaaagctgccagcttacccttgattttccccgccctccatattgcctatggcatcggcacttggaagggaataatagagggactaaaagagacattccaaggagggcgagggtgaatcttgattccctgcacgacttgaaaagtaagctgcagctgcgctggcatttatataaaaaccgacagcttttgaatcgggaagtaaccattatttccaataactgtattgcgggggtcatatatcatgattgcggtttacgatttctttcccctactgtgaacctttggtttccgactgaagattttttcacctacgcggccaacctccttgagtactccccacaacagggagcagaactacgtgagatttttgaggagggaatcagttaccccctggggttactaactccaaaatctgcggatctgcccgcgataaagctttactttcagcattaccccagctttgaacttgccaaagaaaaatgggagcagcgttcaaggcgaataaacttggaaaacatttgtatgatttttgagtgttcgcaacccattgccgaaaacagccctattccagagctttttcgcgcggctccctattcccataaagttatagttaccagtaagcattcggtaactggcgcaggcactgaagttgtacatcttccggtatatgacttgccagggtatcagccgggaaagcttttcaccaccaaaagtaaactgtctttatcccggtggcttgatgatttcaattatgtagagtttttaaatcgcactaaaggaaagctgcttcccgcgatactcaagtagattgtcagcactccctagagtcaatgttcgaaaacagggatcacgaataatctctagctgacaaatgaggatgccaaataacgcgacttcactgcccgcatcattataatttctcgaagattaaaaagttcaacagacttaactattcgtaagttttgacattagttttaagctttacgttcgttaagtatcaatttttgatagcgatttacaagtaactgcgaggcttgcctaatatcgaaacccttctgggcaactagcttatctgccccttctaaacgatttgtcggcagggataggacagtttccgcccaacgatccggcgggtcacctaagccctgctgccgatagctaggaagaattctagcttccgccggtacctggctactcgccagacaaggcagaccattggtctgtgcttctaccagcacaatcccaaagccttcatggagagaaggcaaacagaaactatccatggcgcttagaagcgcgcctatatctgtacgaagacccgcaaaatgcaccgaatctgcaatcccaagtttcttaactcgggtctcaactgcgggacgcagagcgccaccttcacccactaagaggagacatgcatcggggcggcgccgctttacctcagcaaagacctgcactaataattcatggttcttcagggctacgaagcgccctatatgtccgagcacaaaagcatccggggaaatgttgaactcgcttcgcacttccgctctttgttgggggttaaataagaaatgctccaaactgattgcgttattgattactgtgaatgaggcagtagaagttatgcgtttaccaaaagccgcgtttcccgctgctatggaagctgcccaaaagtcagtagccagatagggcagggaacgatagagtaaccagtttcgtacactgcctattaggtgctcagaatatttttcggaatgactatgcgcgattcgcaccttcactccatatttttttgcaagcgtgaaaatcaccggattcaaataaagatcgtgaagttgcaccgcatcatattcaccaacgtgagcccggaaaaaatcctcgaccgctttccaatactgcgggaatcccctaagcccaggttcgggggtcagaaataccctccccccgagttcttcgatttccgcccgaaaggtgtagtcattttcccagaacaccaggaaatcaaaggtaacttctttggcaatgtgacgatagtaattcatcatcgcttgtgctaccccagaaacctgagcgcacgaagccatcacctgtaagactctcacggtaatctcgctactatgccagttttagttcccggaaaccagttttgtttcccgcagcgtaatcactggaattctcatcggctcggagtcgggacgggctattaaataacccatgataatcagcaaaatcccgaacatgtaatctaagcctaggaatgaatcagtcaggaacataactccgctcattatcgtcagccaggccgcgcccaagaagaaatcggaccaatcggggtgacgcagctttatcgcttttccatagctaaccagacatcccaagaaaaacaccaggtagatcccaaatccgagagctccgtagctgattaaaacatcaagataggagttgtgcacgtgatagccccgctccaataatttctgctcagcgcgtagtttctccgctttcgcgtattcatcagtgttgtaggggccaataccgactaccgggtgccctttccaaagctcgagggtttcttcccagatgtaaatgcgcgctgatttagtggaatctcctttatttacgcgaagcatactcacgtcatctgccatcttccaatcagaactggttttcttagatccggcagggtgaattagttcaaaaacttgagtgtaataggaaatttctccctccaccagggcatctatattggcattaaccgtggtgtagccaaaacccccgataaggattacccacaccaccagcagagctttcgcttttttctgtagatactcactgcgccggtaataaaacacgaaaaggcaaagaccggccactgccagggtgattaatagggataaacgggctcctcgagaattgcaaccaacggtagcgataactaccagaactagatttatccaatacaaaattcggtatcttattttaccgcgcgcggtaaggaagatcttttcctgataaatcaacgcccaggtagtaacaaagatactcactattccagcgagtgcagcgtgattcgaatccacattcattccgaaaacgatgaatactcgattcccggaaccataggtcaaagattgcaccccaagacggcgcatggcgcccgctagttcacctaggaaagtaaaacccaaggcaatcattgcgaccgaagtaagcgcctgtaaaccagttattatctgtgcgggcagcaatactttagccagctctctatggggtttggagctgcgcgctatataggctcccagcggataaactaataacaccgaaactgcaagcaggattccggatttaatttgagttaccggatttaccgcatagtttagggctaaggtaactaccgcggcaggcagcagcaaccccagcacttttatccaaggggttttaaagtaggagcgatcctttaataaataataaagaatcaaggcatatgcccagaacaaaagcaaatactgtatcgacccgaggaactcgcctaaaattacaacttgccgcaacacaagataaaccaggtagacactcacgcagtaaaccggattcagcaggacactgaagagcttgcgcgcttgctttggcgccgtaggggtcacagtttcatcacttactactgcttcattcacattcttactccactaaaataagcttttcatttggctcactaaaagataaatagagtttaccgcattagagtgagttcacctcgcaagcagatagcattccctatggaatactgaagttatgaggctaagcgtaatcattccttattataattcagcagaattcttaccgcgtctggaaaaaactttatctaaccagataaacccccggggagaagcagagactgaagttgaagtcattgtggttgatgatgcctctcgccaagcagatcagactctgctagctgaggtctcggctagaaataactggcagctagtgaccctaactgaaaacctgggacctggaggggcgcgcaatgccggaatctctgctgccagtggcgactacttagtgtttttagactccgacgatgagctcatccccggctccctggaaatacttgcggatgcgttgagtaaaacgccttgtgacgtattgcttttcgacttcagtattatcgacgagggaaaagcacacgattataccgttcttcccgaacccccggcacagcttgattacgttagtaccgactatgcgctggccttcgcgcggggaggaacctgcgggaaagtctatcgccgcgattttgttcgtgagcacgacctggggttcggaaccggcgtccggcatgaagatacagtgcttaccaaaaccgcactggcttgggcggaaaaagtcgcttatctgccccagagtctttaccgctaccaggtccacgcagggtctttgattgctgatgattctaatgcttccctttctgcctcctttgaggccttagagcagatccgcaagcttagcgcggacaggcatcctcaagaaattgaatacgtctatattgtcgaagtaatcatttcctgcgcgatgaaattctatcccttaaaagtaacccgcagtcaggcgcgaaaactattcttacgctttgtcgcagactatcctaactgggcaaagaatccttacctgcagaaaggcggaatccgttaccgcttatatgccgctttagctcagcaccactcctttctcggtttatttacactttcctacgtagaaaccgtgatgcgaaaaattctaggtcggggacactgactccctccctatctggagcacttttaggacggaagccagaaacgaagaagcaggctcccccctaagaaacctagttgctatctccgtttcgggtaacaataactatgcctctctagcggtttgtccgttactagatattgatttaccatgctttacttgtagacgttaagtctaacgcagtgaatctaaggagaagcgtggcgatagaaaataaaggcactcccgacagtgctgagcctgtttccagcggcaacactgtttccagtgatgttcctgctacttcgagctccgaacctaaaactaccgattctggtgctacaactattaaagaaaccggaaaaaccaagaagaaaaggctgctaaagaatacgatttttctctatgtcttagtgttctccgggtatttcttttccttcatcactgtcccctatcaaacccgagtgctcggcgccgaactctacggaaaaatcgggtgggcaatggcggtgatggcgtacttcagtgtatttatcgagttcgggtttttactgtctgccactgcgtcaatcgcgggaaatcgcgatgataaaacctatgtcgaaaaggtggtaggagcggtaaccctagataaattactgcttacccttctcagcctggcagttctcgcccccatggcgtttttctggcagaaaatgagttcagatccctggttctacctgctatgtttcctctcggtttcttcggcgagtttcatgctcgatttcttctaccgcggtatcgaagaaatgcaaaccatcaccatcgcctcggttttcttacgagctctcttcaccatcggaatttttgttttcatgcacaaaccccaagactactggatggttcctgcgctgaacctgggaggtaacctcctcgcagccggctacgtctacggacacatgatttttaaactcggttataaaattcgctggcccggtctgggcttcgcctggcaaatcttaaaagagtccacttggtttttcctatcccgagtagccagcactatttataccgctaccaatatcttccttctcgggttcgtctatccggtagccagcatccccatcggcgtctacaccgcagccgacaaactgctcggggtaatgaaacaaaccatgggaccaatatccgacagtctttatccctatatggtgcgcaaccgcgacttcaaactcctaaagaaaatactgctctcgttaatgccggtagtagcgctgggatgcatagtagttgcgattatcgccgagcctatgtgttcttggttctttgggactcagttccgtgatgctggaaaagtattgcgcctgatgatgcttatcctatttattactttgccggtctaccttctgggattccccaccctcagtcccctggggggcgcaaaagcagttaaccaatcggtgatcgtagcttctattttccacgtctttgctctctgcgtaaccttcgtcctcggctacctaaatatctactcggtggtgctacttaccttctgcaccgaaatgattattcttatttaccgagtggttgcagtatctaaatactggaagaaatcaaaagccgggttgtaatcctgccagcacagttagttactttaagcgcaaggcgattccataaataaacgtggctaccgcgatagttatgcgtgccgtcactaccgtggcagcatctattttccgcagtccttttagaggtatccgtctagccagtttctgcactcgttttttcaaagaacggtagcggggatcttggcggtaactaggatcggcggagtactccaccaggcagttgatcccggctttaaacgctgccaggagcgcgagtttcgcttgcgggaggtgtagatcgctcaacaacctatagtgttcttcgtaaaaatcaatcccgtctctatgtttccaggagggagtagccattattgaggactcgttacaacgatagtgataaagcggtgcgcgagtgagcgcaacccgttcagactgtagcaacaccggaagcgctaccgctacgtcctcgtggagacgtccttcaggaaaatgcagatttttatagattcgccgcggatacagtttagatactgccaccgtaagctgctgtaagagcagtcccccatacagctgcgttatcgcttcattctgggaatataggcgccaattcgcttcttgagcaggctgactcatggagtacagctcgcgatcgtcagaaaatctagccagcccacataccgctaaatcagcttgcagctttgaaatcccttccatcagtagccgcacaaaatctggatgcaaggaatcatcggaatcaacaaagcaaagataatccccatgcgcccgcgctaaaccaaaatttcgcgcgctagaaagtcccccattgggtttactgactacttccagtcgcggatcagcgtaactttctgctatcgccagtgaaccatcgggggaaccatcatttaccacgattacctgcaaatttttgtagctctgcgctaacacggaatcaagacagatacgcagatatttttctacgttataaaccggaataaccacagaaactagcggctcactgctgtcatgctgcattgtaatcgtttcttttagtcgcttatccctgcttttcgaggatcaaaacgcccgttggtcatgtattcctgataaggagtatctaaatccatgaaataaactgcgtgcttgggttgctgttgctcaatggggggcgggttaagataatcgtcaccgaactcggcacgcaaataggcgtcccagtcagcaggcatccggaactgctgttgtgttcccgctacttccagtggcatatcgattccttgaccaaaccatttacgccggaaggggacgattataagctttggatcgtcacaaatccttgccgtccattcatggcggtcataatcccatttactcatttgcttctcacaagcccgccatagtttatatcgccagcggggatggggcactagcgctaacgccaccttcgcccccaaagccactactttgccgtggtttttcggcacttcggccacgttatacaaattgaagagttctcccattagcacctgccaccaccaagctagggactttggctgaggtgctccatctagcggaaaaatatcgatggtcaacccttggggaatttttttatctatttgataaggggttaccaaggtagtgaagttgtcacagatttttgccattacatccccggcatgggtattcgcgccggtacggacatagctaaaacgctcggtatcggcttcccgattccaaaggctggcaagtcgttcataatcggggcgaggcatatagacatctacatcatcatcccagggaataaatttcccatcgcgagccgcgccaatcacgcaacctccgcaaccataaaaacgcagcccacgttgatcacaaaaatccgcgaaatactggtagatctcccaagacttctcttgcatctttcgcagttcatcggcactcaccggacgcgtcttagctgccccaaagttttccatctctccatcctccttgattattttcagtaatctcgattcccgattgcgccctgccggtcgctcatccatcctgggaaaacagatacttaactttaagttatcctatctatctgcgactattgatagagcacctggtctttcgcggtcacgaaatcgtgctctgccattaaggcttccggagagatttcagggacagtagtatgcgaaattagcggatggaagggacgctcgtccttttcggcctcaaaatgcaacacttcggagagcttttccccgggacgcatccccgtaatcttgatttcaatatccttcccgctcatttcaatcatgcgccgcgccacgtcaatgatttttaccggctcacccatatctagtaccagtacctcaccgggacgaccaatcgctcccgcttgaatcactagggcgcacgcttccggaatagtcataaagaaacgttccacatccgggtgagtaatggtgatgggtcctcccttctcaatctgggaggtaaaagtccaaagcaccgagccgcgcgagcctaaaacattaccgaaacgcacgctaacgtagcgccagcccttgtcagccacctgctgagaatggtgtgccactatccgctccgccatccgtttagaacgccccaacaccgtagtaggttcagcagctttatcggtagagatatttaccaggttagtaaccccgtactccactgccagctctaccacgttcttcgatcccaaaacattggttttccacccctcgtccgggtattgctccagcatcggtaaatgcttgagcgcggcggtatggaaaataacttccggatggtgggtttcaaagatcgcgcgcagcgcctccctatcccgaatgtcgcagagggcgaaatcgggggtatccagcatcccggatccataaaggtccagttgcatggcatgcaactcggattcatcccggtctagcagcactaattctgccggattcaaggctttcacctgacggcaaatctcggaaccgatggagccacccgcaccagttaccagcacccgtttacctgtcacataactggcgatttgctttaggttagttttgatttcccgccgccccaacaggtcagtcacgttcatctggcgaatattgcttaaatcaactttcccatctagcatctcccctacttgcggagctaccagcagttttaaaccggcatcttttgctaactgtgagtacgcgcttttaacatcccgcaactgcacactggaatctgctggatcaggatgctcggcattaatagagaaaatcgcggtagttacccctagttttttcgctatctccgctaaatcctgtcgtttgccgcgaaccggaaccccgcgcagccgcaaattccgcttcgccgaagcatcgtcaatcaaagccactggaatatagggagattgggtatccacctgcatctgattaatcagctgttcgccagcgatccccgcgccgatgataatcaccggctccggatcctcgaccccattgcggcgtgcctttttgaaaagccgccaaaaaactcgcgcgctgctcataattaatagccccagagccgggctggctaccgccaccacaatactgacgaagcgaccgggatacaccagggtaaatagcgcacctaccactgccgatgccacaacgatgacccctaagctgactacctcttcgaatgaggcaatccagtaacggttcatatagtgcttcgagagcaaaccggcaaccgcttgcaccactatcgcgaccaccgcgaaaactagaatcgcttgttcatccagcgagctcaaggtgaaatcaaacctgagccaagaaataataactactgccagaacccaactgataatatccgtcgccagtaaaataccgcgtcgcagccacgtaggaataaacacgtatcctcttttctgcctattcataaaacctaaagccattctagcgtttactcagtacttacctaaagacaatgccgccgctaaaggaacaaagatattagtgagataatggcagcaggattgcatgctgaccgaaaggctaaaaaatgaaagtgccattttctcctcctgacattagggaacaagatattgaggcagtagtagaggtactgcgctcaggttggatcacctccggcccagtgggggaaaagttccgcaaagcactgacggagttttcaggaaccgccggaaccatgctgcttaactcggcaactgctggtcttaagaatgccctgcggtttttggggattggccccggcgatgaggtaatcgttcccgcctacacctataccgcttcggcctctgtggttgctcacgtaggggcaaaaatcgtaatggtagatgtggaaccaggcgactactttacttctgctcagcgcattcgggctgctatcacccagaatacgaaagcgattatccccgtggatttagcgggacggatggttgatactgcaccgatttatgaagcgattgaggatgcccagccacttttccacccggggaatgccctccaagaaaccttagggcgcgtcgccctgattattgatggcgcgcattctttgggagctaccggatatgggatgcattcggggcaagccggcgatttcaccgctttttctttccatgcagtcaagaatttaactactgccgagggcggcgccctgacttggcgtgcagaaaatcctttggcggatcaggtagagcacttcgtaaaactcaacactttgcatgggcagtctaaatcggcgctagaaaaaaccaatagcgcgggttgggagtacgatgtccttttccctggctataaagagaatatgcccgacaccctggcggctttggggtattcccagttgcagcgctatccacagatgatagcgcgccgccaccagattattgattcctacacccaggcactagcggatctgccggtgacggcgctggctcatagtggcactgatgctcaagggcgtagctggaatagttccggccacctctatttactttccctagacaccctgggactggcggaacgtaaccagttcattgaagaaatgtttaaccgggggatctcgtgcaatgtacactacaagccgctaccgctgctgactgcctatcgtgacctggggttcaagattgatgatttcccgaatgcttacgaggcatactgtcacgaggtcacgctacctctaaacacggtattagacgataaccaggtagaatacgtgcaggaaactgctaaagaaattttgtctaggatgacgaaataatgtttccggcagacgcaaggaaaaaatctgtggacgctaaagagattattgaccgcgctattgcggcggcggcattgatagtgctcagccccctatttgcggtgaccgcgctggctatcaaacttgattcttccgggccggtatttttccggcaagaaaggatcggacgcttcggggttcccttccatatccacaaatttcgcaccatgcgcaatgaaaaaccgaagaaaaatatctctgccagcggtgatccgcgagtaactagggtggggcggatcctgcggaaaaccaagattgacgagttagcgcaactcatagatgttgctcaaggatctatgtcactggtggggccgcgtccggaagtaccggaatatgtggagcagtggccgcaagacaggaaagcactgattctttctgtgcgccccggaatcactgacccggcctcgattgtttatcgtaatgaggccgacgagttagccagtgccgccgacccggaacgctactatacccaggtattgattcctaagaagaccaaaatgtatgccgattatgtgcggtctcgctctttgctgggtgatttccggattattttgcaaaccattgccactgttgcgcgcgggtagctaaatacccggaaaagaaaatacaactggcgcatatatagcacacgaatagctagaggcggcgaggaaaacccccgccgcctctagcagtaaattcagttacttctctagcacctggtggtaggccgccaagtccagcaccccgttaccggaaagcccaatcagcaccacctgatcatcgccagcctccccggaacggatgaagtccagcgcccccgcaatcgcgtgggtagattcgggggccggaatgattccctcggagcgcgcgaactcgagcccagccgcaaaggtctgttcttgcggataagcgcgcgcctccatcaatcccaggtggtaggcgtgcgaaaccatcggcgccatcccgtgataacgcaaaccaccagcatgaatgggatccggcacgaactcatgacccagggtgtacatcttcattaagggggtcagacccgacatatccccgaagtcgtaacggtattcgccttgcgtcagcgaggggcaggctgccggttcacaggccactacccgcgcgttcttgccttcgcgcagattctcgccgataaagggagtagccagaccacccaggttagagccacccccggcgcaaccgaaaatgaagtccgcgccggattcgccggctttagccagttgaacttgtgcctccaagccaattaccgtctggtggataatcacctgattcattaccgagcccaaagcgtagtgcgcctgcggatccgaaaccgcagattccaccgcctccgaaattgccatccctagagaaccggaagtatcggggttttcggcttggatccggcggcctgcctcggtgcgatcggagggcgaactccaacatttcgcgccgtaagtctccatctgcatgcgccgatagggcttttgatcataggaggaacgtacctgccacacttcacattccattcccagcatggagcaggccatcgccagggaagcaccccactgcccagccccagtttcggtggtgagccgtttaatcccggccaccgcgttgtagtaggcctgggctaatgccgagttcggtttatgggacccggccggagaattaccttcatacttgtagtagatgcggcatttagtgcctagttcttgctccaagttgtgcgcgcgataaagcggcgccggacggaaattggtatagagttcccggattcgctggggaatctcgatatagcgttccttgctcatctccagttcgatgagcccgggagcaaacaggggctccagatctttcgcggtaatcggttcgcgggtctgcgggttcaggtagggaggcatcggctccgggaagtccgcgaccaggttgtaccagcgagcaggaatgtggttatcgatcggaaatcctaagggttggattctagggttatcagtcatcttttcttttgctcctcattgaaatatcacttctattaaatagtttccgctggcgggagacaaaaaaatacccgccacctggcgggttctataaatgcctgaaagaaaggacccgcctaggcgagccaccaccactgaatcgatttgatcgctgtttcttccatgcccctatgctaacgaaaacgtgagagcgactacaagccgtctcaaaagttggcgttttgcttttcagagctttagtctaaacgtagccatcaagagcagtgcagagacctggctcgcgcactgcagcaaccgataagacggtgctaatgccaggaccgatgggaaggaacttatgagtatcggcaaagcggaaaagccgctgattgagttgcgggacgtctataaaatttatccccgcaagaaacaggaccagctgcacgccctcgatggtatctccctaaaaattggggccggggaaatccacggcattgtgggacagtcgggagccggaaaatctacgctgattcgttgcctgaccgctttggaacatcccacttcgggcgaaattctggtggcggggcaaaatctttccaccctttctgaaaagcatttgcgccaggcacgccgctcgattgggatggtgttccaggcggctaaccttctggattcgcgcactgctgccggcaatattgcctatccgctgtatttggcgggacaaaaacgcggggatcgccacgagcgggttcaaaagctgctagatctggtggggctgcatgaccggggatcctcttatccctcccaactttccggggggcaacagcagcgagtaggggtcgcccgggcgctggccgatgagccgcaagtgttactgtgcgatgaacctaccagcgctttggataccgaatccacccagcaaatcctgcatttaatcaaagatgtacatgaccgcctgggcgtaaccgtagtgattattacccacgagatgagcgtagtccgcgagatttgcacccacgtcactttgctagaaggcggaaagatcgtacagaccggttcggtggaggacgtagtcaagaatccgtcttcgcggctggcaaaagacctggttccgccccccaatgttgacgaagaagtaactttagacggcgagcccgcctcggtagtagatattgcttttacttcttcgccgggggtacccaccggatctaaagttatggatctggtggctagcctgggcggcgatattgtggccggaacgtttgaaaccgtgggaaccacgcaggttggtcgtctagctctgggagttaaaaccacggaactggacagttttattcgcgaaatggaaaatcatcacatctatacggaggtgcgggcatgagtcttatcgttactacctcacaggttgcgaacatcatgcccatggctgcggatgcttccggtagatggttttccaatccggtgattgctaatgatcttctgaatgccacgttagaaactatctacatgtcgctatggtcgggatttttctcgattctgctggggctgccgattggtttgctgctggtagctaccgctccggcgggactgctatcaggttcgaaggtcgcgcgagtgctctacgcagtgttgggattcatcgttaacgtggggcgctcactgcccttcgttattttgatgatttcgattattccttttactcgcctgctggtaggcagcgttttggggtggaaagcggcagtagttccactgacgctggcggcggcgccgttctttgcccgcctggtggaatccaatgtgcaaggggtagaaagcggcaaactagaggcggcaaaaatggcgggcgcctctaactggcaaatcatgatgggagtgcaggtgcacgaagcgttgccggccctaatccagtcagttaccgttactttgatttctctgattggttacggggcgatggcgggtactttgggtaccggtggcctgggggcgcttgccataaactacggttacaaccaatttatgggtgacgtgatgctaatcgtggtcatcgacatcctgctgatcgtggtcatcgtacagtgggtcggcgacatgcttagccggctggtcgatcaccgctaaggaaaaaccagtcggagtttgttccgctagattttagcggtctagttaaaaattttgttccctggcaccgcgctaggtagctcgggaaagcttttgtcctcgtccgctctatagacgcaggcgaggacgggcaagaaaactttgtaaactacctaaaaaacaactaattaaaaggaaaagaaaatgaaaacttggaagaaaattattgctgcagcgggagctgctggtctggccttaagtctggctgcttgcggcggtagctccgctggtggcgacaccaaactgatcgtaggggcttcccctaatccgcatgcgaagatcttgcgttacgtggccgataacttggctaagaagcagggcatcgagttggagatcaaagagtacaccgactacgtccaaccgaatgaagccctgaattctggggatctggatgccaactattatcagacggttccctacttcgatgagaacaccgccaagaacaactggcagttcgatcacggcaagggaatccacctagagccgctaggaatttattccgaaaagctcaaggatattaaggatctgaaggacggcgccaagattgggatcatcaacgaccccactaaccaggcgcgtgccctaaaactactggccgacaatggtttaattaagttgccgaaggatgagaagcagcagaaagtatcggtgattgccaagtctaaagagtacaatccgcgtggctttgagctgcctgaggtggaaggtgcgcagttagtgcgcgccctagctgacctagatgtcgcggtgatcaacggtaactttgctcaacttggaggcaagaagccctctgaagccttgatcttggaatctaccaagaataatcctgcgctaaatattctggcttggaagaaggattctgaaaaggtagaggcgattaagaagctggacactttgctgcactctccggaagtcaaggcttacattgaaaagacctggccggacaagtcagtgctacccggtttttaatccgactaaccaagtcgctttaaaaatctaatcgccttaaatctcaggggcggggtcgaagaaaatattcgaccccgcccctgtttatgttctttaggtctacaaatagttacggcgattagtccgcagctaccaatatccgcaagaataactgtcagattccccaggtattactgggtaccgttacttgcgcaaagttacctgacaaagcggggttcctgcctgcaccgagccaagggaataatccattgcctccacttgattccgtccgataaacaccaccggggttaccggatctttttctagcgcgagcaggcgtggaatatcgacctcaactatgggctgcccggcctcaacctcctcgccctcactgcatagcagcttgaaaccctcacccttaagccccaccgtttctagccccacgtgtaccagcacctctaggtcgccaaccttgcctaccagcgcgaaggcgtgtccggttttaaaaagctttacgattttcccactaaccggagccaagactggctgtacctgcggtaaaggacgaatagctacgccctcccccatcattttctgagaaaaaaccggatccggaaccgcggtgaccggcacaatctcaccacaaaggggagctagtatcggaaggactgtcatcagctacctctgggttttctccgggacaaacggccaagttttcaggcggtcttgcgcacaatcagctgggtgtccacttggttttcggtggcgtcccatttcttgccatagttttcctcatccaaaaagaactctacgtgtgctaccaggcgctcaactgctagtgctgccagttgttcccgatcttgtcgcaccgtagttagttccacataaggctcagcagcaatcggagtgtcatcgaaaccaactaccgcaacttcctgcggaattttgatgccttcttgccacagcctaatcatgaatccttgggcacacaggtcgttaaaacacatcactgcacgtggtagccccctgtcccccctgctgacctggtgtaatatctcgtcggcaacccgcgccccatcgcgcggattttgtccgccctgatagatacgattcgctacactttcgctggacgataaccccgattctttaaggcagcggcgaaatgcggcttcccgcacccgggcgttagcctgattgtcgccacaaatatgcacaatgtcgccaaaaccctgcttttgtaaatactggaaacctttctcaattcctaaggcatcattggacaccacggcgtcaacattctttgatccagattcttgacacagggtaatcagcggtatggtagatgcaactttttctaaatactcaccggagagttttgtaccgataagaattattccttcacagcggtcttgcagcagggattcgatgcaatccatttcgctgcgcagtcccacgcaacccgccgctaccaagcgatagccttgtttttcagcgtaacgatagagcggatccatcagcgaggtttggaactcttgctccatataataaaccacacccagcaaatagctgcggtctagacgaatgagggcggcctgccggtcaggacgataccccatctcaaaagcggcgcgctgaatctcagcgcgtctcttttccgaaactccgggtcgtccggacaacgcaacggacaccgtagaaatggcggctcccacttccttggcgacatcggagatagttactttttgtttcatagcattgctcttagagtatcgctaaatagcctatagccatggaggttcaaacctctgaaacataatttggaataaaccaaatagctaactaaacacccctaagattcgtttgagcattcacaggtaaacgtatagttaacgttatttattcagttgttttccgagaaacacttggatttgcaagaaaggttttccgaagacgccacctgcgccctcggaaaaccaaatcttgcttagttactgagcgggattactgtccgaactcgctcttcacccgggcaatcatcttcttattgatttcgtcagcgcggtcatgccagccgaatacgcacagagataacacgccatcgaacttcatatcccgtaaggtgctgaacagctcgtcccagggaacttcgcccatgccgatctcgttgtgctggtgtacccgcgcgtccactcccggaggattgattacgtaacggtttccatcgaaggccttgtggttataaacatccgcaatatgtacttctttcagcaggtcacctgcagaacgtagcatccgctctacatcgcccttgccatcggaaaggtggaaggtgtgcggagcgcagtattcatagccaatccagggcttatttaccccgcgaatcaagttgatggcgggatcgtgtagctccacgaagtcgtaggggtgtgcctccatgtgcagctgaatcccatatttttcaaaatcgggtgtgagttcttcaatggacttataccactgatgttcgcagtgccggggagtgttgggatccccggaaaattcagaaacaatctcgcgcacatctaactgatcggcaatctcgagcaaccgccgccagttgcgcacctgggcttgccgctcttcctcgtcaacacatgcccagttaaacaccgggttcaaagtggcaatcttaaccccggattccttctgtgccttgttaagctcggcgacaaaagcatcgtccgccttggggtagtgatgccagaagtgaaaatctgccgttggcgagagttccacataatcaaaccccagttcccgggctttatgcagggtttgcggaaccagcataaaccagtaatacatattggggtcgagagcaatcttgaccatttttcattccttctacttggcggtgactatattcatcagggcgagtattgaggttcctccctcaggtagtagcctcttcgctccgcttatttgttgggcaccctcagcttagccgaaacgtttcgtcacatcgaggcttttccggggtttcccgtttgtagacttggttgacaccaaagcctatctacctttatttaacacgtgttaaacaagggtgtcaagggtattacccttatattttttctcgcgtaataaaaaaactgcgatttgcattttttcactagacgcgtccttgcccactaaaatacctattccgcctcgtaagtttgtaaagtagatgcttagagggaaaagcgccgcttagcgccgcgaccaagaaggctaggcacagaaagaaggaacaggaaatggaaaccggcaacacttccaaagtccaggaatcaaacgaactaaaagaacgggtggcgctgaaccgtcagcttgcccagatgctgaagggtggcgtgattatggacgtcaccaccccggaacaggcacggattgccgaggacgcgggcgcggccgccgttatggcgctagaacggatccccgccgacattcgggcagcgggcggcgtttctcggatgagtgatccggcgatgatcaaggggatccaagaggcagtttctattccggtgatggcaaagtgccggattggacattttgtggaagcccagttgctggaagctatcgaaatcgactatattgatgaatccgaagtcctctcccccgccgacgacatctaccacattgataaaacccagttcaaagtacctttcgtgtgtggggcacgtaacctgggtgaagcgctgcggcgcattggcgagggcgcaaccatgattcgcaccaagggcgagccgggaaccggcgacgtggtacaggcagtaacccatatgcgcgagatgaacgcggaaatccggcggatttccagcctgcgcgaagacgagattttcgaggccgctaagcagctagaagtaccgctggcgctgttgcaagaggtacatgattctgcgcgccttccggtcgtaaacttcgcggctggcggagtggccaccccagcagatgcagctttgatgatgcagctaggtgccgagggcgtgttcgtaggttccggtattttcaagtccggcaatcccgccaaacgtgccgccgcgatcgtcaaggcagtcactaactttagggacgcaaaactgatcgcggaactttccgaaaatctgggtgaagccatggtggggattaacgaaagtgaaattgacctactgatggcagaacgcggaaagtaagccccctccaacagaatcggtcagcgtaatcagatggaaaaagttggcgtactcgcagttcaaggtgccttcattgagcatgaacagtgcctgcaggcagtgggggctcaggtagtcgaactgcgcgaagcagcagacttgcgcagcggatttaaccgcctggtattaccgggcggagaatccacggtgcaatcaaaactgctgattgaactggggatggcggatcggctacgggatatgattaccgccgggatgccggttctgggaacctgcgctggactaatcttgctggccaagcagattatgggtaaacgcgacgtggatcgcacggcactcggaaccttggacgttaccgtggaacgcaatgcctatggacgccaactcggttcctttaacgcccgcgctgactttgcaggaatgaaagatctaccgatgacctttattcgcgctcctcgcattagcgaggtggggccgggagtagaagaactcggacgagtaaatgggctaattgtgggggcgcgagccggaggtcaaatcggagttactttccaccccgaactgaccggcgacccgcgcctgcaccaaatgttcttgaacctctagttcctttagctacctttagccttcctcgcgctggaagctcatagtggcttcatagtgtccggattcgctcggccagcgggtagtaatcgctttggccttggtgtagaacttcacgccctcggggccgtggatatgagtgtccccaagtagcgagtctttccagccaccgaaggagtagtaggcaaccggagtcggaatcgggacgttaacgcccaccatgccggcctcaacatcgagggtgaacttgcgcgctaccccgccgtcattggtgaagatagcagagccgttaccaaagggagaggagttaacgatttcgatggcttcttcataagtttcggcgcgggtaattaccagcaccggaccgaagatttcctcgtagtaggcgggcgcatctttggggcagttatcgataatggtgggccctacgaagtagccgttggggtaaccttccggtcggaatccgcgtccatcacgcacaatagtcgcaccgcgttcttcagcgtcagtaatcagaccttcgatgcgttcctgcgctttcttgtcaatcaccggtcccatctcgcagccttcaaccatgccttgattcacgtgaatctggtcagcgtgggctttgactttctcggctagtttttcaccagcgcttcctacggctactaccaccggcaacgccatacagcgttcacccgccgctccgaaagccgctgccgaaatatgcttggcggcgaaatcgatatctgcatccggcatcacgatggcgtggttgtttgccccgcccagcgcctgtacccgtttgccgtgagcaaccccggtgttctgcacaatatgtgcaaccggagtggatcccacaaaggaaatcgcatcgattcccggatgctccaagatggaggtaaccaggttacggttaccagtcaatacctggtaaatcccgtccggtagccccgcttgcttgtagagttcgccggtaaagagggcagcggaaggagtggaggacgcgggcttaataataatggcattaccagtagcgatagccaaggggtgcatccacatgggcaccattgccgggaagttgaacgggcaaatccccgctactactcccaccggctgccgcacggtgtaaatatcaacaccagtcgaaatctggtaggaatattcgcccttcatattggcgttaatcccgcaggcatagtcgagggtttcccgtccgcgctgaatctcgccaatcgcgtccgagtagttcttgccgtgctcctggacgatgagccttgccatcttgtcttggttttccaaaaccaggtggcgcatcttgaacatgatgtctacgcgttttgcgagcgaaagtttcgcccactctttttgcgcttttttggcaatctctactgcgtgatccaaatcttcactagatgcggacggaaccgtagctacgacctctcctagcgctggatcttcaatatcgatgtgtccagcaggtttcccctgtgcgtattcaccgttaatccaatgctgcaactgttttaccattgtcagtttctcctcagaatgttgctgaccttatcgccggtcatgccaggttgtaggcatcccctttgattaactgaattgtccttacaatagccactatagtcgacctaagtcccagacacaagagcacacctgcgtgagcgtactaaaagtttcaattgaatggcagtctttagaaaatagagttgcgccgccctcaaaaactactagagccctggcaaatgcgccctcccctagcagtacgacgccgtcctcgcccaaggaatcctaaacttcttttccgcccgttagcgtggctttagaggaaagtcatttaagctgataagcctcattttcatttgttctatcttcctgtttgccggagagttatctgcctgtttgccggaatttggaattttcgaggagggagtgcagcaagtgcagggcgcgaacgtgacggggcgcggcggacgtcgcaccgagagccatacctgccggaggggacgcaggagacgcggtagaaaactcccggcgaaagggcaggctgaggacagtaactttgccgtgggtggctaaacgccttggtgccagcgggcaaagacgctaacaatcagggattgggggacgtgaagatgtaaccttctagcggcggcgagcaaagaagtcctttagttgcgcggaacattcctgctctagtaccccaccgattacttcaatacggtgatttaggcggctatcgcgcaggacatcacggacagagcccgctgcgcctgccttggcgtcccaggcgccgaacactacccgcgaaacccgggcattcaccagggcaccggcacacatagtgcaaggctccaggttgaccaccaaggtggtgccggtgagccgccaagtgcccaggcggcgcgctccttgtcgcaaagccataatctctgcgtgagccgtgggatcaaaaggataggtttcccgctggttaaagccgcgcccaatgatttcccagtctcccaggtagggaggggaatcactctcggaagtgggcgcgccctcgcccggggaagccagcgcaccctcgccggtaaaaatatcagcacgccggacgctaattgacgccaaattttcggcgcggggagcgagcaaaagcgcccccaccggcacatctgcctgcttttgtgcacaggttgccaaatccatagcgcggcgcattacctcgtcaaagcgattcatgccctcaatttacctggcattttacactgataaaacctggtgcttttcgcagacaaaaagctaaataagtgaaagactggatacatgtttgaaagagccgggcaaaaagccaaaccagaagatttaatcaatgtcgatgacctcctagccgcctactatgacctggagccagaccccgccgagccaagccaacgggtcagtttcggcacctcgggacaccgcggcagcgccttcgaccacgcatttaacgaagcccatatcgtggccatcacccaggcaattgtggaataccgccgcaaccaggggattagcgggccgctatttatggggcgtgacacccacgccctttcggagcctgctcaccgcagcgccctggaagtgctggtagctaatggagtggacgtgcggatcgattcccgcaactcctatgtacccaccccggcagtatccttagcgattctgcaggcaaatggggcgcctggcaaagtgcgcacctcgggcgcggatgtggctgacggaattgtaatcaccccgtcacataacccgccacgcgacggcggcttcaaatacaatccccctaccggcggccctgcagacgtggacgctaccggctggatcgccgatcgcgctaaccagattctccaggacggctggcgcaatgttccgcgctctacgctagcggatttaactcgcgccgactgtgtccacccccatgattatctgcatgaatacgtggatgcgctgcccagcgttatcgacttggatgcgattcgctctgcgggagtacgcatcggcgcagatcccttaggtggagcttccgtggactattgggggatgattgctgagcgtcacgacctgaacctgacggtagttaacccggatgtggatcccgccttcagcttcatgaccttggattgggatggaaagatccgcatggactgctcctccccttatgcaatggcttcgctacgggaaaagatggcaccggacgaggacggggttacgcctttcgatattgctaccggtaacgatgcagattcggatcgccacgggattgtcaccccggatggactaatgaaccccaaccattacctggcagtcgccatcgaatacctgtacacccaccggccggaatggggcgagagttgcggagtcgggaagaccttggtttcctcctcgctaatcgaccgggttgttgccaacatgggacgcaagctggtggaagtaccagtgggctttaagtatttcgtgccgggattactctccggaactatcggtttcgggggcgaggaatccgccggtgcctctttcttacgcaaagatgggtctgtctggacaaccgataaagacggcattattttggcgctactagcttccgaaatcctggcggtaaccggaacttctccctcgcagctgcataaacagcaggtggaacgtttcggggcttccagttataagcgtttcgaggccgccgccaccccggagcagaaagctaaactcaagaaactttcttccgaggacgtaaccgccgagaaacttgccggggaagagattaccgacaaactggtgcgcgcccccggtaatgacgctgaaatcggtggactgaaagtagtcactaaggacgcctggtttgcggctcgcccctcgggtaccgaagatatctacaagatttacgcggaatccttccagggcgaccagcacgttgatcaagtgatttccgaagcgcaagaggtagtaggcgccgccctctcgtagtcggctctaacccttataccgcaagggcggagattacttttgtctcccgcccgctgcaagcgttgggggctaggtttttcctcccgcccaagaatccggtaaatacctttggtatttaccggattcttatgcccaccgcgcctgctcggataaaacctagccccaaccccgcgcctgttccgcgagaatccaaccggttgccatgctgcccggatattccccaccaagccggtaagggtgaggattacttttgtcgatcaggttaggcgggcgtaagaacttgggtaataccttgggtattgcccaagttctttgggcgggagacaaaagtaatcctcgcccttaatatcgggtcgggaggtaaaatctttcccctgcttcccaggtacaaccccttagttaccgggagcggagttggcggttggtggcggcagtggcgagggcggcgcggggatcttccggccaaggatgcttgcggtacctgccccgcatttccgctcgtacctgcggatagacttcatcccagaagtgatctaagtcggtcactaacgccagcgggcgacctgccggtgacagcatctccatcgccaggtcgacttgtcctcccaggatttttggcgcggattgcatcccaaagaattcttgtagtttcgcctgcacccgaggcgggccgctggtgatatcgtcgggatagctaatagcgccgcgccggccggaaggaagtaaaaattcgctgggtgcctcttgttccaaggtacgccgagtttcatagtcgagtatcccctccaaccaggtcgttaccggggcatttgcagcgttttttcctgctgcaaaataactgatcaacacctgccagaagcggggattatcatgtaaatcctggtcactaactgcagggacattgggcaaatagcgcgccgcccagcgcaaacgggcgcgtaagcgagtggctttagggttccaagtcagaaaatctagccccacccgctgatactcggcttcgaggacgcgctcaggttctcggattttcgctttttgccgctgcagagggatttctcctagacaccgttgctgccaagcgctgatttttccatcccggtactcttcaaaatgtttttcttgttttagatgacttcccagctctaacgccagtttctcggtgaggggcgcggctaaacgaatcaggtcgtcaccgcctttacgcaccccaatttctgcaatcgccagccatttactggtggataaagaactgtcattgtctaggcgagccgctcccgacccagaaagctgatataccccgtccttactggttagacgccctatttgatcgggaaatgccatcgccaccactaatccaacgcttaaatcgcctgcaagtttttgcaaattagctggtgaacttgcagcttggctattcgcgctgccttgccctagctgcccacccctagcagataacaacgacataaagttctcgctaccagtatcgataccttgataacgccgcgccaatttttcaaagcggctacgctcagtgcgataagttctatctccttgacgttccgcgcggcgaatcgcagcccataaatcaccgtctgaactacgtaaatccacttgtaaagccgccactacctgggcggcacggcgctcacccaccagacgcgcccccaaaatcaaggcgcgtgccaggcggggatgggctggaatttgtaccaattggcgtccaaaagcggtaatccggcaatcattatctaaagcgccgagtgcctgcaaatccttctccgcctgctgccaggcagcaggcggaggggcggtaggcagtaccagaacttccagatcggtttgcccccaatccgccagttgcaaataggtctgggcaaggtcactccgcaggatttctggctgcgtatcgggttccatacgcgcataagtttgctggtcatagccgcgaatcacatatccaggtcccaggcgcgcggcacgtcccccgcgttgagttgccgcggctcgcgagcaactcaaggtgctcaatcccccggcatttccacgcagacggcgactgggaacccgcgataatccactgtcaatcacctggcgaaccccgggaactgtcagtgccgattctgccaccgaagtggcaacaattatcctgccctccccgggcttaagggcgtcctcactggcggaagaggcaccctgggacagcacttttgcctgctcgcggggagatagctgtccgtgcagagtcatgattcgctccggataactagcacgcaaacgcaatgcggaggcaattgcctctacgtccgcgattgcgggcgcaaacactaaagtatcagcctgtatgcgatgttttaacgccaaatcagccaaatagtcgcggagctctagggaagttccccgctcactaatccgccgcacccgcgctggcggcggcgcgaacacttcttgcagaggaaaaagtttgccctctgcctctaaaacgggggtatcttcccctaaaaccttgcggaacagttcactatctaaagtcgccgacatcacgactattcgcagctccgggcgtaactgacgcacctcgcagagcagagctaataaaatatcggtatccaaagacctttcgtgaacctcgtcgataatcaccgtaccaatacccgagatttccggatccgtcagcagttgccgcaaaaacaggccggcagtcacaaaatctaggcgagtatcgcggctgcgagtggattccccccggatagaaaatgcgactttagctgccaggttatcctcattattaggtagcagtgtctgcaggtaactggcagcagcccgggcggcaatccggcgcggctcggtcactattacccccgctgccggggagttatttttcgcccgcgcatcctctaacgcccagcaaatcggaggaaccaaagtggttttccctgaccccggctcagcggaaacaattactttccccgcggtttcgagggcgctttccagtttcggcaagattctcgccgccggaagctcaggggcgagggcgcgtgcctgggaaagcgtgaacatacttctattgtgcaccgcgggagataaaagcaaatacttccggcagcgggactgccaattaggaaagcgcctaaaagttgccacaatggagctatggggtattaccggttaggcagacgcaggcgttctgggaaggacttttcctggggtacccgcattattgcgggatttattattggtttgctggcatgggcttttatccctggaatcggtccggatttagcgggactttcccaaaaaggagcccccaaagtggggttacccaattgggggaaaagtgcggatcagattctctccgaatcggtgcagaccgatttggtaaaagcagtcgccagcctgcccgagggcgagtgggaaagcgcctccccctatcagcgttctcaattcggtatccgttgggcagatgttgatcgcaatggttgtgacaccagaaacgatattttacggcgcgacttgtcccaggtgcagaccaaggcgggaactcatgattgcgtggtgctatctggagaattcacagagccatatactgggcgtttccaacgatttcgtaaaggggcagacacctccagcaagattcagattgaccatgtagtcgccctctctaatgcctggaaaaccggagccagcaggtgggatgctaaagctcgtgaacagttcgccaacgaccccttaaatctgctggcggttgatggtccggcgaatcaagataaacaagataaggatgccgccagttggctgccccctaaccagggatttcattgtcaatacgtggctttgcagaccgcgattaaacaaaagtggaagctgtgggttactccggaggaaaagcgggcgatggcgacagtggcagcgtcctgccccgcgcagcccctccccgctggttagcccgcttcgcggggtaggtaattttaaataccagttgcttaagtttcttaattgttaatatacttaactatatggataacacttcgaacccgaccaacgagcgcaagcagctattagaccagctcctttacgaactacacagattagtttttgcctcaactgacctggtcaaccggtattcctcaaaattgggattgcacgggaaggatggagaagccttgctgcaaatctggcaggcagaactaagtggcacccccctgtccccctcggaattagcagaacaactacacatcacccgggcagcggttagttatctcaccgatcgcctcatcgatttaggatacgtaaaccgggaaactaatgagaccgaccgccgaaaaaccatactgcggatctcagagcttggcggacaaatcgggcatggcttcaccgcccccatggaagcgggacttaatggattgtttgccgcgcgcacgcaaaaagaactgaaaacttttaccgaaatgctccaggacttcgtggaatccctagacacctcccacgaccttaaagcctaagactatcgccagaaaaccacggctaattaaggatcaaaaatgagcgatctacttggcgcttcaaataaagaggaagcgaaagaatcaaagaaatccggagtatctccgacagtaaataaccacgcccccagcgattttactgcccctaagcggtggaaactcgtcctcgtcctctatttagcaggcatcgggatgggcgccctcgatatggggattgtgaacccggcgcgtaccgtgattcaaaatgggctgggagtaggcgataaggttggggtttgggttttcactatttacaccctcgcctatgcggcagcgattccagtaatcggaaaaattgcggacattattggccgtaaaccggtatatgtactggcgattgggctatttgggctcggttccctgggatgcgggctagcgcaagatttctcttccctaggactgttactagcttcccgcgccatccaagccatcggaggcggcgggatggtgccagtagcaaccgctgcagtcggcaccattgttcctccccctaagcgcggcatggccttaggactggtaggcatggtttatggcgttgcctcagtgttcggcggctctgctggttctctcattttggatatcgccggacaggaaaactggcaatggatcttctacattaacgttccgattgcggtaatcgtggtcgccctcggaatttgggcgctcccgcaagaaaatgagaattccgcgcgcaaactagatttaccaggggtatttatcctagtagtgatgattaccgccctgttgtgggcattccaaaacctagacttcaccaagatcggcgaatccctgggagaccccaacgtatgggtaggtttacttattttcctgatcatgctgccagcattttgggtagcggaagtgcgcgccgatgaccctctcatcgattttaaatacttcgctactatcaacgtgggaactactttgttgttcgctgccgtatccggcattttgatgatgaccgtcatgttcatcccgcaattcgcggaaaactgtatgcggctaccctctggacgaggcggctatcccacgattattatcggcttggcctcggccatcggggctccattaagcggacggctaaccgaccgttttggtcctcgcttcgtgctagggattggggtgctgatttctaccatttccgggttcatgttgatttattgggcgagcccctacccgggatacctatcgaattcggtttcgattttcgtaatgggtctggggctaggattcctgatgggggcgcctttaacctacctaatcttgcacctgattccagaaactgacgccaactccggacaggcgacactctcgctgatccgctcactgggtaccactttggctcccgcgatactggtcgggttacttgccaccgccatgggaggactatcgggcaaagtcatggacgccatgcccaccatggaaatgccagcgatgcccgctatgactgctccggcacccgaccctaacggaagtatgccccagggaatgtctccgcaggctcaaggcagccgggaaggaatgccggaaaatatgggcgagggaggccagacgatgcccccacaaaccccaggtaacggggaaactatgccgcccgaagccgcagttaacggacagaccatgcccccaagtagccaggcaaaagccccagcagaaacgccaactgggaaagccgccacccccatggcgaaatccgatatgggattcaagatgtccgatatgcctgcttctctgcaaaataaaattaaaaccgctgatgtaaccaacgtggtagatcgcactaaagaagttgcgaaatatatgttcgcgcagcaggaagagaaaatgaaagccaaaatggggatggttcctcccggcatcgataagatgcaggaacaatatcttaaagatatcgagtcccaccgtgaccagatagagaccgcgttccaaatggggctaaatgaaggattcactcgcctgttctggttctataccattttgtcactagctgggatattgctcctagcaggactaccttccaagcgcaaaattgatgccgtaatcaatccggagtcggatcgaggtctggctcggtaaaagcagaccgtgtccgggtctggctcggtaaaagcactccggggaccccgtgagcttcgcaaagctcagctcaagccccgttcgtatcttttaccggccgcgacccggacgtgctcctcccgcccaagaattcggaaaattccaaagcattttccgaattcttatgcccaccgcgcctgctcggataaaatctccccctgcggtaataagtttttcgcacactctctttcccaccaccatcgcgcctgctcactgccctgcccaaaccccgataaaagccctcttatgcacatctgcgtacctcaaaatggagggaaagctggggcggagataaatccgttagtggaaaaaatggggtgaaagatagaaagataggggtatgcccacaagttccttagcccctgaagttattgaaatctggttccgggcagtcgatgtgaccggagtgttttgtgctgcggtaattggcgcgaaactcgctcgtgagcgccgttttgatgcagtcgggttcgccaccctggcggttatctccgcgctgggcggcgggatgacccgggacgtgctactacaacagattccggttgcctttaccgatcctttttatttaggaggcgccctcttgggagccaccgtggcgttcttttggcgcctggaatcaaaatggaccaaccggatgataaccgtggccgacgccctctgcctggggtgttgggccgctaccggcgcccaaaaaaccctcgccctgggactaggggtgttacctgcgatgatgatgggactaactactgcggtgggaggaagtattatccgggacgtgatggtgggaaagattcccaagatttttgggggcgctaatttgtatgccacccccgctgccacctcggcagtaatcatggtggtatttttcaaactaaatatgccggtactggggatggcgctctccattattgcggcgctgatttttgtacttttggcacagtggcgaggatgggtacttcccgaggcacttgatttgagcatcaatctaactccccgccagtttcggcagcttttgcgtttgcgtgataccaaaccgcaggattcaaaagacactaatccggtcactaaagataaaaacacctctggcagtgattaacgggacgcctacaaagggcggtaacgaaactccggcaagaaggacgacctctagccatgcatagctggaagtttagagctgggtgccgatagctaatcccaacaggtaggtggctcccgccgccccatagccgatcagcagttgtcgcagcgctttgggagccggatttacccccgaaagcaaccccacaattccgcctacgataactagcgctacccctactagaatcaccgcgcctatcgcaccttgcaggggtgaaagcggtaaaaggaatgggaatagcgggacgaaggctccaatagcgaagaaagtgaatgaagaaatagcggctttcatgccggtaccgatttcttcatattcccggttacccgattctagataggcgtgtccaccggtcttaattttggcaaaggcggcagccgccttacggtcagcggtcgcggcatcgtctccccgcgcccgaaacactagcgacagttcattttggttcatattgagcttatcgatggcgtgttcagactcggggtctggggaagatgaagccaacagttcagtttgagaacgtaccgaaacgtattccccggctcccatggagagggcgccggacagtaagcccgctagtccagtaacgataatggtggttttagaaactccggtaccaaaaatccccaggatgagggcgcaggtagagaccagaccatcgtttaccccgaaaacggcagcccggaaactgccagaaatagtggcgcgttggcgggcagccagaccgcgcaccacctcggaatgaattttttcatccgccacaatttccttgggaacatccaggtctgcctcgtaatcatgccgctgttctgctcgttgcatcatcgccaacataaagatagttccgaaaatgcgcgtgaaaaagttaagtagccgtgaacgtaggcttgcccgcggggtgggcagcgcgtcctcacccaggagatttaaccaatactgttcgtgacgttcttcggcgattgataactcttggagcacttcccgctcatcgccactacgccggcgcgccaggtaacgataggtgtcggcctccaggcgttcttccgcgagatattttctccaacgccgcacctgtttcctggaaacagcaggtacctgagagccatcaacagctgcgtgtttattagctgagtcagccattttagagacgtgaatccggtccttcaacagttatttcttcgatttcgacatctacgaactcgggattagatttgctggagggcgctactccgaagatgcgttctttgaccgcgtccgcaatcttgtcggtgacggcttcgccttggcggcggaaaatctcggaagcctttttcttggtggcctcccccgctttgcgtacctgcggattggaagtcaccgcgttaacggtttttgctaccccgccctctgggttctctcgcacttcgcggcgaaccagggcaataccagcgccgatgccgagcacggttaggagtttctttcccacggctaacacctttcaaatcgataagaataagcgttcctcattctatcgcacgtgcatgatgaggaaagttgcagcaagttgagaactatccttaagcaatttccgtattttttcacaacatattttatgtttcgcggtttacggtggatacatgagcaagattagtatcgacacttcccgaggcatcaccttggcagccgactttgtagtgccggtggattccagtaaatgcgcggtggtgtttgcgcattctttcttgcttgaccgccacgggctgggatggttcgatgttttcgcaaaatcttatcgcagcgctggttacgccactttgcaactggatttttccggctgcggggaaagtgcggatgatgtgatccatttagaaaaccagattgaggatttaaaggcggcctgcggttggctctctgaacgaggcttcgaacggataatcttgcatgccgatggctccggagccttggtagctttgcgtgcggtccccgacaaggtacaggcactggtgcttacggcaccgattttaggcccggcggaggtttcctgggaggacgtattttcgccctcgcaactagctgagttagagcgggtgggacatactcggatccctaatgaccagggggcttcgcgaccatattttgtgatcgggaaacagactttgggggaactaaccatggtcgacaccgaaaaattactgcacgatatcgccctcccgaccttatttgtggttgatccccagacgctcgcctcgcaatggtttgccccactggttgatgatccgcagtcgttacttcctcccaattgcgagctgttattcctagataagctcagtttgtatggggagctacccgctacctaccgcaaaccggacagcacttacccggatgcggagaaggtggatttcttgcgggatcaagtagttgcctgggttactcgtgtggctcctgcggttagaacataagctaatcaagggcggccagtctcttcgttttctaggggattaggttcccgaattttctttggaaaacaacggaaaatctttataacatcccactagctacatcttttaccaaacgtaaagctaactttcaggttcatttatattatttttcagacaaatgtcttatgattgataacagcaataaggattgagcgttgatcgtttgatatctccttatttgcttgagatggggaacaaaagtggggcggattccaaaggaatccgccccactctctgtctacggacctcaccgccggttagcgcccgcacgagccgctagcttagaaaactagggcgcgaatgtcaccattcgctgggatcgccggcaggagcggcgctgatttcgaacaacaaatccccgacttcaacctgattaccttccgggcggagattttccagatcagagggagtcgaatccagtaccaccaccgggcaaatcggcgagtaacgcgctttttcaatttgtttaaccgagaaagtagtgatgggctctccggctttaaccatttcattttcgagggcgtggcaggtgaaaccgtccccccgcatctttaccgtgtcaatccccagatgtaccagtactgtttgttctccgttggcaatcatgaaagcgtgcgggaacagctttattagtctcccggaaatgggcgctactgccgtcagttttttggctccggggagtggacgcaccgcaatcccggcacccacaatcatgccggagaacactaagtctggtacctgccgcagccccactagccgcccaggaatcggcgaacacacctgtaaggatggctcccccatgcttcaccccaatcccaaaaggagaactaactttctttataaaccagcctagcccgcccgcgtcctacagaaaaacttattattttccggagggcgaggggcggtactcacacgaaaatcacgctgaactcatccccgttcttcctcgcaaaacgtaaagcgaaatagcaggttaagaccgcgctagcctacccgcgtttgcgagcacggaaaaccaacacaactcccgaagccccgagcagcagcgaaataaataccatctcgggtactcctgcaccagtggttgccaggtggtctacgctacgatcttgcacagaacccttaacctttccagagggtttgtgcgtcggtttcgtcggaccagaagcaggtccctgcggattcggctgcgggtttatacccgggtctggctccggttccggctcgggcgccggcgcctccctcaccaataaaatacttaaaggaggtaccgtaactttaccgtttgaagtgagggttaccggtttttggtaaacatccaatcccttaatcatcacctcgtattccccggctggcaaaggagcctcccaagctagtttgtctgcattcacgtatgcgaacgcatcggcgctgtctttaccactcttagtctttagcgggaacgcacccttgacggtataacccacatgattagtagcgatgctctcttcaccagcaataatttcatgcgtgtacttctggtttacagcgtcgtaactgccctggcgcataaaatcatattgcttacggaacttgtttaaatcccggaagaactttacttccttttcatattgctgagcccggtcatagtcgaaaacattaaccgagtcgggggacttataagagttgtgatcccccgctttggtgcgcaagaattcctgccccgcgtggataaataccgcgccattggccaggtactgggtgccggtaccgagggcgtgccgctgagctacttcgctatcgggggtatctgccggcaaactgcctttcaatttatcgaacatggtgtagttatcatgggcttcgttgtagaccacggattggtctggccccagatagttacgcacatattgggcgcccttgatattgttcaacaaatcccaagagcgttggggctggttcgcaccactaataaatccggtgtggttcaactcgaagttatcgccctttacggtgtcacgatactggtcattgaagaacgaaattccaggcatctgtttcgcgttttcctggttagccgccgctaccccactaggatgattacccatcttccagccttcgcccagaatcacaattgagggatcaatcttatttagggcttcccgcaccgctttcatggtttccacgtcatggatacccataagatcgaaacggaaaccgtcaatatcgtagtgctttgcccaataggtaaccgaatcaacaatgtatttgcgcatcatcagttgttccgaggcggtttcattgccaactccggttccgtcttggaacttgcagttcgcatccatccggaaatagtagtcagggacagtttgctgcaacggagaggtttccggattgtagacatggttataaaccacatccataattacccgcatatcgttcgcatgcatggtttctaccattgactttagttccaggatgcgtgaggtcggatccgccggtttggttgcgtaagacccttcgggaacattatagttttggggatcatatccccagttgtattgggcgttataggaaaggtcaccgagttcatctacagacccgaaatcaaaaatcggtaataactgcacatgggtgacgcccaaagattttagataatccaggccagatagattcccctccttagttttggtacccgcctcggtgagccccaagaatttgcccttgttggtgatgccgttatccgggccgatggttaaatcgcgtacgtgtgcctcgtaaataatcgcgtccttcatcgaggtaaatgcgggcatccgtttgccatcccagttgctgggtacggttttatcggggtcaatcaccacggcgtgcgtaccgttggcggtaaccgcccgggcgtagggatcgatagcttcgttaaccttgtcgcccgcgaaatggaggcggtagcgatactgctttcccttttggtcaccgtcgagcgtaatctcccaggttcctttttcccctttggtcatggcagtgacttttccgttctcggaatagttaacgaattcgactgtttgggcagtgggcgcccataccctaaaggtggtttttttcggggagtaaatcgcccctaactcgccctcgtaaaaatatttcttattaaaatccgcggtatgtagcttcgcacagttactgttaggagtcggtttgggaatatctgcttccgaatagtaaattttggggtcaccctgcacaatccagatttccgccttcccctgggggaacttggtaacaaagaggtcgtcgggagtgtttttctctgcccattcatttccgggttccgaacggcgcacaatcagaccaactttttcaatcccatttgggtctttatgagtaagggtggcggtatggtttccatcgaaatccgcttgctttccttccgtttccggaagccaagtccacacattccagttgtcatatttattgtcggagcgcaggtagtgaacagtgacagtgacttcggtagggagggcagggggattttcggcgggtttcagctggtagctgccatcggtttttatatcgatcccgcccggaactgggatatctttcaagtcagaggtttgccacgcccagtcgtttgtcgcagtagagcgacgcacaattaggtttactttttcattcggagccggaacggtgacttcggcggttaggttgcctgccccatcctttccggtgaaagccacggagtaaccaccagacccctcggtccacacccacaggttatattccgatgcgggtacattgggatcgggggtaaaactcacctttaatttgccgtctgctgcgggttccagtccgtcctggttatagctgaaactacgagcatcccacctggtgaaaacggagttccccggtttcgcgccagtatacacggcggattcccagactcgattttcgctctgccctggctgtaaggaagtggtgtcagtgcggtagacccggaagttcaggggatcgcctggcgccaagatatttgtgtttatatagccttccggttgctgggcggagaacttttgactttgctttgcctgcccatcagcccagtactctactcggtaaacagttaaggggttttgaacggttggatccggtttgaagttcaggtacattacctggctattaggaccagcgtgagctaaaggagtaacactacctgctattaccagcagaaaggcgataaaaaatcccaaaaaacttctactaattcttgatttcactggtcctcctcgaccaaggcgtaggcggcggcatcgccggaaacgtttccgaaaccatggtatccgacttcaaataagatatgaagattgtatttatgtgcgtttcctcacgtttagctagctttttcaagagccaacactgccggctaacgcgcggaattgttaatcctatgatggtgtcgcggtcgattgcgcaagccgggaaactggcagctcaaccgagaatcagcttcgtacacgctcctcgctgtgtgccctaatccgggcgataattcctatccgcactcttcaatgcgcctatcaatcccaaaagccgctggaaccaagcaggaacacatttccatcgataacgctgccaggcgtcggagctagattaatgtcctcaggcaaggctatggcaattggaaagccgcaatccacctcacaccgccaccacttttgcccggtaagactgttagtcctgagttccgccttttcaacaactcccttaaacattgcggagggattagcttcttctggttgattatctccgctggccaaggcgaacagccaaggactagtaacaaatctaggaccaatatagatttcattcggcataccagggactggagggttatcaacttgaataggagtttggtcttttttccatgcttcctcattcgggtaaatggaaacctcaatcgccgccccggagagacgataatcatcatactcagcaaattcaccctcagtaccgaacgggcgcagcgggtaacaatgagggtcatctactgcagccaacaagcgccaagtaggactaccattcccgttatcatcgtagatatcgagcaatgccagcgagggctgaatctgatatgccctgactatgcgtccccccatcccctttaatgatggggtcgtaaacggaggatcgtcctcgtaacggaagatcccgaccccggcttcgctctcatctttataaagacccacaaacatgaatgggtcaacatccgatacgcccaccactccggtgtcaattatcgcgtcagccagatcctcccactcgggaaaatcgaaacctaatgcatgaaaatcaggggaaaacatggttttattctcccagatttatacctattgttaccggaattctgaaaatttctattcgcgagggcgcgtcctcaccgcattctgcagggaaaattggcgggacaaacaatctgctccctagctagccgagttctgaagttaatctagcttggcggcggctgccagcattttttcaatctcggcgcgatattttccgtctgcgttccggatttcgccgctatctgctaggtaggttttcaagaatttttctagaggacgacccaagccttgccccgcaatcctgccggtactagccgcgatcccggcatgagcgcgtcctccaaaactgagaagccacatatcctcccccaccggcacgttcgcactcaggcgcggcatcacgaaaggaaagtccaggtgtttagctcccaggcgctggtagaaagcccaacgccgctgcggatcccctctgtcttccgaggacgcgtggagctgcggatcctcaatttctcccagaatcaacaggggattattactagattccagagcgtaaatcgcttgacggaaaagtttagagcccaccccatgaccgcgagtgcggggactgaccgccagccaactcagcaaagtaacttcgctggttgccgaccatgctatcgctgcccctagcgggcgcgtgccctcccaagcagaaaaagtctggaactgccccgcctgcagctgagcgattaaatcttccggctcccccaactcttcgggcccaaaagcagttttcaaaagttcacgcaccaggatttctgtctgccccggttccaggtggttttgatactcgatttgcacctcttaaccctagcccacaacatgagttaagctcgagtttccatgccagctagatgaagcacgggcgcttagctcaatcttccagaccaagttccgccttcacttcctctagagagtaagttttcgctttaccagcgcggatttcttctacttcatttagtagggtgtatttcgttaacgcctgagttaacgtgcggatacgctatccctatggctacaatgtacacgcaccaagccatcggcaccgtgtccgaagatcagattgtcggcaaagccatgctaatcgtctggcccctaaccaacttcggcggagttcgttaggttcgctcttctggaagctgtcagatattggagcaggtattaaccccgcaataggggtaggcggcgtgctttagaaattggaaaaaccccgtcaccgctggatcgcaacgaggacggggtttggcgcgctcgacaggattcgaacctgcaaccttctgatccgtagtcagatgctctatccgttgagccacgagcgcatttgccgttgccttagcaactacctcagtctaagacagagccaataagccttccaaatccacgacagcttatttaatgtgattcacacactagcgccgcggtggggacgtactgcacgggggatagtttttatccgataggctaggcgggcgtaaatccgtaaatgccgcaggcagttacggattttgggcagcaggaaaaaactatcccccgcatattatgtgcttttaccgagccagccccgaagcgggaggcaaaatcctactccccgcgaaacctccgcggggtaactctacgcaacctaatcggtaacgaactgcatgaacagctcgtttaaggcgtttgcatcttcgtcagttttgcagatgaccagaatagtatcgtcaccggcgatgcagccgagcacggcatcaaaccacgccatatcgattgcgcctgcgagcaactgggctcctgccgccggggtgcgcagcactacctgattatgcaccactgcggaagataccagcaggtcttgacaccatttcgccaacttttcattaccgggatcttcctgtccccgccgcactcgcaccggataaggctccggcagcatatagatagttttcccactggtagcacgcactttggtggctcgtaaagctaaaagatcccgcgacagagtggcttgggtggtagggattccgcgttcagccaagtgggtaagcagctgtgactggctagagatttcctgcttactgaggatttcacggatcgcttcctcgcgcgcagccttagtggtcggtacggttgccatgcccctatcttcccattacatccgctcgggagctaccactccgcaaagatccaagccattttctagcacttgccgcacggcctcattcaggtgcctgcgcgccacgtgtgcgtcggttatttcctcgccggaacggggaattacccggcactggttgtaccaagtgtgatagcccgccgctagtttctccaggtaacgcggaatccgatggggttcgcgctcttccgcggccagtttcaactctgccgggtattgcgccaaaatcccgagcagatccttatcggcttggctagacagcgcggaggcatcatatttgccatcagctttcactccggcctcatcggcgttgcgccccaccgagcaggtgcgggcatgcgcatattgcacatagtaaaccgggttttcattggtgtgggagcgcagcaaatctaggtcaatatcgacagtggaatccatcgacactcgcaccagcgaatagcgggcagcatctactcccaccgcatctaccaggtcatctagggtaatcacggtgccggcacgtttagacatttttacttctaggccgttttctttcagattcaccatctgcccgatgataatctctaggctctgacccggcttgcccccgaaagctgcgcacatggcatacatacggtcgatatatccgtggtggtcagcgcccaaaatcaagatttcatgggtggctccccggcgctgtttgtcccgataataggcaatatcggctgcgaaataggcgggatccccatcggatttcaagattacccggtctttatcgtccccatatttagtggacttcagccaggtggcgccgtctttttcatagatgacaccgcgggaacgcagctcttcgatcgcgtcagtaactgccccggaagtgtgcagctcgtcctcgtggaagaaaacatcaaaatcggcgcggaaatcatgcaaacactctttgatctctgcaaacattaaagtggtgccggcttcccggaaatattcttccgcctgtgcttccggcagctccgctagctgcacgccctctgctttagcgcgctcagccactttatccgcaatatcgaggacgtactgcccgccgtaaccatcttccggcacctctttgccctgccaacgcgccaaaagcgacttggcaaagcgagtgatctgggcgccgtggtcattgaaatagtattcgcgggtcacttttgccccgctggccgccagaatccggcagagggtatctccgacggcggcccagcgccctccccccaaatggatggggccagtgggattggcagacacatactccacgttaatgttttgcccactcaaaacttcgctgtgcccgtaatttttcccggcctgcaaaatcgtggaaacaagcgccccggcagcagccgcccccaaccaaatatttacgaaccccggcccggccacctcggttttcgagatacctgctacctggtcaagctgggcggtgatcttagcggcgaggtcgcgtggcgccatacccgctttctttgccaactgcatagccacattagttgaccaatcgccattatcgcgcgaacgcggacgctcaactttcacggtttccgggatagcgtccggatctaaaccggtgtcggctgccagttgagaaagaatctggcggattaaggcacttagttcttctggagtcatgctttaagcctagactgccaggcgtatttatcgccaaatctggcgagctagcccacaccggtagtcagctggcacaatagggctatgagtgagcaggtttaccacaaggttgataatcgccatcccgaggctctggagcttgaagaactggggctaaagtggctggcagagccgatggataaaggcggagcgcacgtggcgaaagtcgcggcttctggtcgtgggttcttagacaccgaattaataccctctaccgccatcaccagcgaagcggcgcgcgccttcggggcagcactggcgattacccacgcaggcggagccgattggtacgggcagccccctctgggctattccggtcccggctatatgggtcgctcccgcttggatttaatttatgaggacgatggacaaagctggggagagtttttcgcggatcaccggattatgccgaatctgccgcctgccctcgccaacgggtcgatcgatagttcgggagtggcagttttagagcggctggctgagcgcctacgcgatggaatcttcaatgctcccgaaccagagttagtaaaatccaaagccgcgcgaattcacggtgacctgtggaccgggaacgtaatgtgggcgcccgcgagggccttaaagcgttttcctgctctggcgggaaggggcgctgcctcggatcagccccttcccaaagcggtgggggtactgatagatccggctccggcagggggacacgcagaaaccgatttggcggcattgggagttttcgggcagccctacctggaggaaatctaccaaggttacaaccaggtctctcccctagcttcggggtggcaagaacgcatcggcctgcaccaaatccatatgttggcggtacacgctaacctgttcggaggatcttacggccctcacactgtgcagctagctagtcaatatctctagttgctgcgggcggctgatagctaccgggactcccgggacgtgtctacgaattttagaggatggaattgacgcgagactcaagcaagcctgaaaacaggttaggctagttgctatgaaccacattgtcgccttgcttatgggagcagtattactggctggctcagcctggattcggcatggcagtgcgagagcccgcttttggatcccgaagcaaaagaaagacatttcccgctccggcattctgattatggacgaacgctgggtgttggtgttcttgccggcgctgggactgttcttcctgactatcggagcaactctgcccgcaaacgccgcccccagaccctggaactatctcctgctgaccatatctttaatcggcgcagttatcggcctggtagggattatctggggggtaactaacttctactatccggagggagtgcgtccggcgtggctgcgcgcctactaccagcggctggggttttcgccttcccgaggtgcgcgactagctcccgcctggtaccgcgagcaactaggtgacgggaatttagaaaatccccgtctgaagcgcaataagcagacagccgaaaaaagtgggaaaaagacctctgagaaggcgacacataacaaacagaaacgcaagcagcggcgaccacggtaaaaacgcttgttccagtaaaaacagctggtctccgaacaacaaagaccactttccctattcagaaaacatccagaaaacatccagagtggaaacagttgtcggtgccattatggggccaaagagataaagaggagattgagattgatgatgaacaacaatgattcaccccgacccgataacgctcatcagccgctcgacgactgggaaatggacgattggcaaagcgccggctggcccggagaaatcccggagccgagcggtaataggtttccggcagcagatcccgggaacaacggaaacattaactccagcaaaaacgaggacgcgcgtcccgaattaaccggtaggattaccgatattcaacccggcaacccggcgattagcggcggggaggcatcctccaatagtggaatcagtccccaaactaatcaggattttcccgctggacaggcacgactagagggatatccttccccctacagctctggtattagcggggcctcccactcgcaaaatgaaagtttcttctctaacgactttgcccccgagcaggcgacaaacactactactttcccctactccccctcaccccagggaacattttcctccccggagcatcccgcttgggaaccggccgcgatgcctccccggaaacaagaaaaaactaaacggggtccgggttggctagccactatcgcaatcgcggtggcagcggccctctgcgtatggctgttgccagccgaatttgggtcccgtactactgcgcttggcaaatctccagtaaaggtggcaaccgaagcgccggtagtgcaagctaacgccaaacagaccaactgggaggcagtcgccaaagccgtccagccctcggtggtagctatccaggtggcttccggcgattccggggaaagcggatccggggtaattttcgatgaggccggacacgtgattactaactatcacgtcgttgcctccgcggtttccgggaaagcgaaagtgcagatagagctgaataacggcaaaatctatgaagccaaaattttaggtactgattcttccactgacctggcagttctagagtttgtgaaacctccgaaagatttacagatggctgcgctgggcagttcctcgaatttgcgagtcgcccagccggtagccgccatcggttctcctttggggctagagaacacggttaccaccggaatcatttcggctctggatcgcccggtagtagtcacccagtcttcgggtaaatcggggattcagattccgggacttaatgagcgttctggtgccggggaacgggtcgttaccaatgctatccaggtggatgcggcgattaatcccggcaactctggggggcctctctttgatgcttccggcaaggttattgggattacctcctcgattgcttctctaggttcctctggggagggacaggccggttccatcggtatcggttttgctatcccagtgaacctggtacgtaacgtggccgatcagattatcacctcgggcaaagttacccacgcgatgctgggagtcaccattgagaccggaattgcccagatttctggggaggctcgtatgggggcgagggtgtcctcggtagttcccggctcgggagccgataaagccgggctcaagcaaggggatctgattactaagattgatgggcgcctggtgggttccggagttgcactgaccggctatgttcgctggtacaacccgggggacaaagtaaaactcacagtaatccgggaggacggctcccacgagattgaggctcagctcggcgctcagaaagccgatcgctagccgatacgtaccctaaacgaagtgagcccgctggaaaaccagcgggctcacttattggttttaaactctaggagaagatcgcgcggaagaatccgccgaaccaggagaacaccctcacgaagaacacccgaactttaactacaaaattattggagttatcggcttgctcgtctggctgcgtagttggctccggtaccgcagtaggcggatcgtccggagttggcgcctcggtaaaggtaggctctggggtggagggggtaggttctacgcttggctgcggatccggagtcggcttaggagcagtggtcggatcttcactgggctgaggaacctcagcagtgggattcggggtcggattagcggtttcagtgggaacctccggctgagccggttcactcgtaggttgagccgtaggctctggctcttggctgggctcaggagtagtcgtcgaatcttcactgggctgcgcggtttcactaggcgccggatccggtgtgggctcgggaacagcggttggatcttcactgggctgaggaacctcagcagtgggattgggagtgggctgagccggctcggagcccgccgggtagcctaaatatttttctaaaccttgtagcgctagagccacatcggcgcccccaatcgggttcttgaaatctttaacccctgccataccggcggccattaaatcgcctttacaagtgtgatccagacctaaaagatgcccgatttcatgtgccacagtagaaacttgcgtcagccagccactgcgatcaagacgcaagtataagagccgctgggcagcataggcggtaccaatcgctttaccctcggaatagggggaatcgattacccgtaccggacgattagccatcgaatccacgaagcggaagttaatctttccgccactgcgttcggtccacatcttggttgcggcttcgattgctgggcggaacttggtgttacccaaatatagggacaaagtataagagtcggcgctggtagcgccgatcaaaaaggtatctatattggtgatgggttgtcctttagctacctggttatgcattacccggcattcgcgcaccgtaggagtgcggtcagcggcttgcacattttggctcccagaaactgcgaacagtccccccattgccagccccaccatcgttaaggtggctactaaaatattcctttttcgactcatactcatactcaaatcttaccaagcggtaagattaaagcaaggtgatagtcccatcttccttgagagctttttcatatatggctgtccgccgctttgccttaaataaaacaacaggtaaaagccaagggggcttgcctagctagcttagctaggcaagccccctttaggaactcaactacttagattaaagattcaaaccgaaagaatcttcaaaattaatgccggccaagaagtcatcgtctagttcagtgactttgaaatcgtcagctgaccagcccatcttagccatcgcttcctcagtaggttctacgctggcatcccggaacatcgacagaccagtacccgccggaatcaacttaccgagaatcacgttctctttcagacctaccaagggatccttcttcgcactcaaggccgcatcagttagcaccttggtggtttcctggaaggatgccgccgacaaccaagaatcggttgccagtgaagccttggtaatccccatcagctccggacgtgccgcagccggctccccgccctcggaaacaactttacggttaatagagcggaaccgaatcgaatccaccagagtacccggcaacagatccgtatcaccggacttcaacacggttacccgccgcaacatctgacgcacaatcacctcaatatgcttggagtgaatatccacgccctgcgaacggtaaacctcttgtacctcgttgaccagctgtcgttgggtagagttcacacccaagatgcgcagcaccttcttcggatccaggcgaccctcagtcagctgctgacctacctcgacccggtcaccgtcagaaacaatcagtttcatgcggcgaggagcatcgataatcaagtcatcttgaccgtcatcgcgtaccactaccaggtgacgggtctgaccggggtcatcaactacttttacacgtcccgaagcctcggtgatcaacgcttcacccttgggagtacgtgcctcgaagagctcctgtacacgcggcaaaccctgggtaatatcagcagcgcccgcggcaccaccggtgtggaaggtacgcatcgttaactgagtacccggctccccaatcgactgggcagcgataatccccacggcctcgccaatatcaacccgtttaccggtcgccagtgagcgcccgtaacaggaggcgcaagtaccggcctcggattcacaggtcaaaacggaacgcaccggaatctcggtgactcccgcttcgatcagcacatcaatctgggcgtcacccacatcggtacctttagcgaataccaggttgccgtccttatcggtaacatccttggacaaggtacgaccataggcggtggtttctacgatatccagcttgtaaacgtgaccatcctcggtgaccccaccaatgggcagcaccagaccacggcgagtgccacagtcctgttcgcgcacgataacatcctgagaaacgtccaccagacggcgggtcaaataacccgagtctgcagtacgcagcgcggtatcagccaaacctttacgcgcaccgtgggtggcgatgaagtattccagcaccgacagtcccgagcggtagttcgatttaatcggctgctcaatcagcttctgcttggggtcagccaccaagccacgcataccggaaatctgacgaatctgatcccagttaccccgagcaccagaggaaaccatccggttcacctggttacgtgccgggaagttctcccgcatagcctgcgccactttggcagtacattcggtccacaaatccaccagttcgttgtagcgatcctgggcggtaatcaaaccgagatcggcgtcctcttgcacctgagtggctttctcatcgtactcggcgagaatcttcgcttttgccggcggttccactacgtcagcgaagccgatagtggtacccgaccaggttgcccaatggaaaccagtttccttcaaagcatccaaggaggccgctacattgcccttgtcgtaacgctcggccaaagtattgacaatccgagaaagccccttcttgtcaatctgctcgtttacgaacggataggaaaccggcaacgcctcgttgaagaagcaacgcccaatagaggtttcgaactctaccgaatcgccttcttcgtagccttccggagcctgccaatccttcggcggcaccgtacccggctcgaaacgaatcagcgcagtagcgttaatatccaagcggttctggtcaaaggccataatggcttcacccagtgaagagaacttgggggtaatcgggtttccgtcctcgtcggtcggaaccggaagggaaggatcaggatccgaggtcaagtggtaaataccgatgaccatatcctgcgaaggcatagttaccggacgaccatcggcgggcttcaaaatgttgttcgaagacagcatcaaaattcgcgcctcagcctgagcttccgctcccagcggcaggtgtactgccatctggtcaccgtcgaagtccgcgttgaacgccccacaagctagcgggtgcagctgaatcgctttaccctcaatcaagatgggctcgaaagcctgaatacccaggcggtgcaaggtaggcgcccggttcagcaacaccgggtgttcggtgatgacttcatcaagcacatcccacacctgcggacgctggcgttccaccatccgcttagcggccttgacattctgcgcttcctgccgttctaccagccgtttcattacgaagggcttgaacagttccagagccatctgcttgggcagaccgcactggtgcagccgcagctgcgggcctaccacgattacagaccgaccagaatagtcaacccgtttacctagcaggttctggcggaaacgcccttgcttgcccttgagcatgtcggaaagcgacttgagcggacggttgcccggaccagtcaccggacgtccccggcgaccgttatcgaatagggcgtccaccgactcttgcagcatccgcttttcgttattcacaatgatctggggagcacccaaatccagcagtcgcttcaagcggttattacggttaattacccggcggtaaaggtcgttcaggtcagaggtcgcgaaccgacctccatctagctgcaccatcgggcgtagatccggcggaatcaccgggatgcgatccagcaccatcgattccggcctatttccggtctgcaagaatgcagaaaccactttcagccgtttgagcgcacgagtcttgcgctgaccggtaccagtttcaacttcctctttcagcttttcggcttcggccttcaagtcaaagtcccgcagacgcttttgaaccgcctgcgcgcccttatcgcccttgaagtaaatgccgtaacgcatctccaagtcgcggtagagccgctcattgccttcgaggtctcctacctgcagttccttaaagcgggtaaagacttcatcgcggtgagaaacttcccgatccagttggcgacgcatttgcgccacctctttatcagctgccttgcgcaccttttccttttcagcattcttggcatcttcagcctcgagcgccgccaaatccttttccagtttttcctggcgggcaacaatcttggcttcaaagcgttcattcaaacgctgtatttccaagctgagctcgttttccagatttggcagatcctggtggcgggcatcttcatcgacctcagtaatcatgtaggccgcgaaataaatgactttctctaggtctttaggcgctagatccagcagataccccaaacgggaaggcacacccttgaaataccaaatatgggtaaccggggcagccagttcaatatgtcccatacgttcgcggcgcactttggagcgagttacctctaccccacaacgctcacaaacgatgcccttatagcgcacgcgcttatattttccacaggcacattcccagtcccgggtaggaccgaaaatccgctcacagaacaggccatccttttcgggcttcagagtgcggtagttaatagtttccggcttcttgacttccccgaatgaccattcagccacgccttcggcggtcgccatgccgatatgtagttgatcgaatttatttgcatccataatcgactcttaccttctcttccctgctgcctagatttcttccaaagaaacattggggtttggccgcgagccaatattgatccccaactcttcgctggcgcgctcagcaccgtcatcgtcttcagccagggacaccacattgtcttcggcgtccagggcctccacattcaggcagagggagcgcatttcttgtatgaggacgcggaaagattccggaatgccaggctcaggaatatcctcgcccttaacaatcgcttcgtagaccttcacacggccggtaatatcatccgatttcacggtcagcagttcctgcagcgaataggccgcgccataggcctccatcgcccagacctccatctcgccgaaacgctgcccgccgaactgggctttaccacccagaggctgctgcgtaatcatcgagtaaggcccggtggaacgagcgtgaatcttatcatctaccaggtggtgtagcttcaacatgtacttgtagcccaccgaaatcgggtaggggaacggttcgccgctacgcccatcaaataggcgagctttaccgtcttcgttgatgaggcgatccccgtccgcgttcggacgggcgcatcccagcagtccggtcaaaacgtcttcttccacaccgtcgaataccggggtggcgaccttttgccctgcgggagccgtgaggccttccttggggagtttttcaatccacttggcgccttcttctgccagcttggaagcatcccaaccctggtgagcaatccaacccaagtggaactctagaacctgcccgatgttcatacgaccaggtacacccatggggttcaaaataatgtcaaccggagtgccgtcctctaagaaaggcatatcttcgatcggcagaatcttggaaaccacacccttgttaccgtggcgaccagccattttatcaccaatggtgatcttgcgacgctgcgctacataaacgcgcaccatctgcttaacgccgggaggtagttcgtcgtcatcatcgttaaactcgcgaaccccgatcacaatcccggattcgccgtgaggaacccgcagcgaagtgtcccgcacttcccgggctttctcgccgaagatagcgcgcagcaggcgctcttcactggtcagctcggtttcacccttgggggttactttcccgaccaggatatcgccggcctgtacctcggcaccgatgcggataatgccgcgttcgtcaaggtcagcgagggcgtcctcggagatattgggaatatcgcgagtgatttcttccagacccagcttggtttcgcgggcatcgatttcgtgttcttcaatatggattgaagtgagcacgtcatcttggactacccggcgggaaagaataatcgcgtcctcgtagttgaggccttcccacgacatgtaggcaaccagcaggttcttgccgagggcaagttcgccgtgatcggtggccggaccatcagcgattagctgcccgacctctacccggtcaccggcagccacccgtacatgctggttgtagcagttaccggggttggagcggtggaacttgtccagcttataggtgaagtaagaaccgtcatcgcacatgatttggacatgcgccgcgtcggcttctactactaccccggagtgttcgctgatcatggcttcgccagcgtccatagcggtgcggcgttccatgccggtgcccacaagcggagcctcggtggtcagcaagggaaccgcttggcgctgcatgtttgcacccatgagggcgcggttggcgtcatcgtgttccaggaacggaatcagggcggcagccaccgaagtcatctgccgcgccgaaacgtccatgaagtcaacttcttcgcgccgcatttcctgcgggtcttccccggcgatccgacaaagcaccagttcttcagcaaaagaaccatcgtcatttaggggtgccgaagcctgggcgatattgtaaccggcctcttcatccgcacttagatagtgaacctcgtcggtgacttttccgtctttaaccacgcgatagggggtctcaatgaaaccgaaagagttcaaccgggcataggttgccagcgaaccgatcagaccaatgttcgggccttccggagattcaatcgggcacatccggccatagtgggacgggtgcacgtcacgaacttccatgcccgcgcggtcacgagaaagacctcccggaccaagcgcagacaaacgccgcttgtgggttagccccgacagcgggttattttgatccatgaactgggacagctgcgaagtaccaaagaattctttgatcgcggccactaccgggcggatgttaatcagcgactgcggagtgattgcctccgcatcctgggtggtcatccgttcgcgcactacccgctccatccgggaaagcccggtgcgaatctgtgcctggattagttccccaaccgcgcgaatccggcggttaccgaagtggtcgatatcatcggtttctacccgcaggtcgacgatttcgccgtcctcgttggtagcagataccgtctggtcgcccttttgcagcgccagtaagtatttgaaaccagcaacgatatcgtccagcgtcaaagtagaagtgtgaatatcgctgttgagccccagtttgcggttgaccttgtagcgaccaactttggccaggtcataacgctttgggttgaagtagaagccttcaatcaggttgcgtccggcttcggcgctggccggctcgccaggacgaatcttccggtaaatatctgcccgggcatcatcggtggactgaatgttgtccgaatccttgtccaaggtcgaaagcataatcgggtagtcctggaactcttcccggatttcttccgcggtcattcccagggcgcgcaagaacaccgtaccggactgcttgcggcgccggtcaatgcggatacccacgttttcccgtttgtcgatttccagctctagccatgctccccgcgagggaatgaacttgcagccgtaaatgtctttatcagaggtcttgtccgcgactttctcgaaataaacaccaggagagcgtaccaactgggagactactacccgctcagtgccgttaataacgaaagttgcccgcggagtcatcagcgggaaatcccccataaacacggtctgagatttaatctcgccggtgttttcattcatgtattcggcagtaacgaagatgggagccgcataggtgtaatccttggctttacattcttcaatggaatacttcgggggctcgaacttggggtcagaaaacgacagcgacatagagccggcaaagtcctggatcggggaaatctcttcaaaaatttcctctaaaccagaaagcaccggatcggtgcgacgggtcgcttttgctttttcttctgcactctcgcgccactggggggtgcctaagagccattcaaaggactttctttgaatgtctagcagattcgggggagccataacttcctgcagttttgcaaacgacaggcgagagggcttattggcggatgcggtttcagcagccaaaaggattccttccggacgatgtaacttcgcgcgtatttctggtttccggccccttccgggctctggttgctcttccgaccgccttgcgcattttagaggcgaatcagcagaccagaccacatcgggctacggcaaacgcaagtatcaatgctagtttgaaaccgctgattatgccacataggaggcgcggacgtgcgcattttcacagcttttttaaatattttgcgcaaaattgtttgttgctcccccgcttttgggagtttccaagcgccttcctagtacctacttatccgaattttcttgccctaaagtgaactctgcatcccgttcgtgggcaactaacttcgccagttcacctgcctgcgccagcacctgcttcggagcgccctgttctactaacttgccccgggaaagcaccaacacctggtcagcttcctccacttgtcgcaaggtgtgggtgatttcaataatggtggcctgcgggcgaagctcgcgcacccggctacgcagccgctccgctaactgcggttctaaatgcgctgtgaactcatctaacaccaagacgggggaatcagaaagcagcgctctggccaacgccaatctttgccgctgccccccagaaagcgccccgccatgttttccaacccgggtttttaaacctgcgggtagatctgcgaccgtctgatccagttccacgattttcagcacttgccaaagctgttcctcttccgcgtcaggtttggccagccgcaaattatcggcaatcgaagccgaaaaaatgtggatccgctgagtaaccagaggaatggcgcggcgaagagcttccggatctacctcgcttagcggcaacttacccaagaggatctgtccgctatctacatcccaataacgcagcaataacctggccaaggtagattttccgctcccggtcgccccgcagatagccgtccaggaaccggcaggaatagtaaaggaaatatcgctgagcgccgcaggcgccgaaatctgttttccgctttggggataggtgaaagatacgtcctcgaaaatgatcgggaaaggtgccgctggtagctgcttacctcccgtgggcacctggggagcggtgttggcaacttgccaaactcggcgagccgccgcgaaagagttggccaaaaaagtagagaaatcttccaccccccggcaaacctcccaagagcgcagcaccgcgaatacggcagccagggcgggtgcgagcgcggtgaaatctgttgacgccggcatccccacccaaatcaccgctagggctgccagatacattccgctttgcgtcagggcgcgacgcagcgcatatagcgaggtcaaagcgcgggaggcggcaccatcaatcgacatatagcgttctagttggataatcctggtgcgctgcaaaccatagccgacaacctcgctaatcccgttgactgaatcggttacggactgcgaaacctgtcctttggcgctggcagaggcatcggcagcccggtttccttctcccccacccagcagggctaaggaagtcagagttgctaggtagataaggaataggagggcgccgctgaggggggaaaccaaaaagccggtcagaatcgaaaccccgagcgggattatcagggcgctgaaagccggaaccagggtgtgagcaaagaacacttcgatccggtcaatatccccggtgatacgagccaacaggtccccgcttttcgcccccaccatacaggccggggattggggcgccagccgcaagaacatttcttgccgcaagatctccaaggctttgaaggctacatagtgtccagcgaactgttccaggtaacggaaaaatgctttcaggaacgctaaagcggccatcaccgcaatgctcacccaaagataagacattggaaaggcgccgccgccagcgatttctaccactgcggcgctaactcggtaaaccccgaaagttatcaagccgatgcctagtccctggtctaataaccgggccgcccccgatatgtacaagggttttagcactgggtgagccaggctcagcaaccaggcaataagctggcgggttcccaccttgtcaggtgcgggcgaccctgctgcttcaccggcttcggccacagatgtttgcccaggtaggttttgattgagatcttctgtatctcctttagtagggcgccagcggtctaagaatcccggttttttgctcacggtgtcacctcctctaaagcgccattattgaggtagaggactcggtcggcgttagccagagcgctggcacggtgggtgagtagtacgatggttttttctcgcgccacctccgcgagcgcctgggtaatcgccgcttcggactccaaatctatctgcgaggttggctcatccaggagcagcaagtttcgtccagacagcaacgcccgcgctagcgatagccgctgggcttgccccccggaaagcgcatagccctcctcccccaccggggtatctagtccttgcgggaaagaactaatttcctggtccagacgcgcctgctggagacaatcccacagctgcttttcactggcccgcggagaaaccatcatcaagttagagcgaatcgtgccactaaaaatccaggtgcgttggagtaccagcgcagattgtcttctaaaccactccctactacccgtttccaagagacgtccttgcaggttaatagcgcctttactgggcaacaggttgcctttaaccagttccattagggtagattttcctgctccagaagccccgcagatggccgcccattccccacttttaactttcaaattaagttcgctaaggacgggcttgccaccggggtaagcaaaacttactccgtgggcagcaagcagcacttcagaggtatctgttttaggatctcgggtctggttactaccccactcttgctcactgccgcaatcttgcccgctttctactttttgggtgctaactgagccttgcgcgctagctgcaccggaggtagcggcatcctccgcctgaccttccgatcccgctgaaaccgcctttacgaaggtagaagcagttttctttccagttttccgctgcggatgcgagggcgctttcccgcttaagaaggcgcgcaccaggcgttgattcgccatccccgccatccccacatagaagaaggcgccgattttattcatcggttccaatagcagcaacgtcaatcccaacatggaaaccacgggagcgatcacggtgatatcggagccccatgaagcattgagaaccttccagagggtgagggcgaacccgcaggtaagcagcaagagattgaatcccatatcaatcaccagcaagattagctggttggccgccagcaagcgcatagtagaaagccggttttcttccccggctttcgctagttcttccccccgcgagtcggtagcgcccagcaggcttaaagtttctaaaccggaaatagcgtccaggtaggcggcagccagctggttgcgccgccgccgcgatttactagaaactttccgggtcaatttggagaacacaaaaataatgatcggaaccaggggaacaaaagccagcagaatcaaggcacaccaggggtcgataaacaacgccatgagccccagcaccagcagaggactgagcatcgctcctatcatggagcccaggaatgcctggcggtagcgctgaattttttcggtaccggcagtcatcatatcgaccagagaaccagcgttacggcgggcaagaactccgggtccttggtgaaaatagctacgcaaaagacgcgactgcaaggccacctgttctttatggaccgaacgctgctcaatcgcgattcgcgtcccctcgcagcctccgatcccaatagctaggacaatcaagccgctgagctgcccggagaaacttttccccgaaaaggcttgcccaaaagcactgcccagcaaaatcatgaacccggcagccaacatgactgaaaccaaagttaggagcacgctggcgataatcgctactgtccccgccggacgggaaattgacagttttttcgccataaagtcctcttgttcactcgttttcctggctttactttacctgttttaacctacacaacgcaccgccgacccctgccttagtcctcaagggaggtaaagtaacaagcatgaatcaaacccaggtgagcccgggcggcgaaaaagacttgtaccagtcagaaatggcggcgtcctctgataccactgacccgctggcaaatcttagcccctaccagcgttatgtacgtcgccgtcagcaacgtgaaaccatggttttcactattatcggctcggtgatggccggcctcttggtgctttccattctggtcggattcgggattttacctttcccgttcttcaatgacttcaaacaggctccccaatatgcccaggccggcgatgttccctgcccgacctctgaaaaagcggttccccttgacaaaatggaagtccatgtagtcaacggtaccgatgtttccgggctggccggcaaagtagccgcggggttaaaggagcggggcatcccggtgaaagatattggaaatatcaccaccggatcctatgagggcaatgtccagatcattactggcccgaccggggttaacgttgcttacactttggcgcgtgccttcgaggacgcagaaatcgttttagatccgcgacctacttctgatgtgaccgtgactatcgggtctcgctattccgatatggttaccccagaaaagttcaaaggtatcgcccaaaagaatcttgaggagattgacggctgtaagctggtgcagatcgcctaagctccacgaggtcgagtattctcgccgttagcagattattcgctcgcttgcggagcagaattatccaagtttgacgctacccgtttttcataggagcgggactctagatccgtacccgccggggcagaagccggagacgcctgttcgaggaaggtaccgcgcgccttcgaaatcccccgcatcacgtggtagaccacgatcgcggcggccgaacccaaagcaataccgttgaaggtcagggagccaatctgccaagtgtagtcggcgatggcaataatcatcgcaaccgcagcggtattcagattcaccggatccgcaaaatcaactttgttttgtacccagatccgcacgcccagcattccgatcatgccgtagaggacggtagccgcgcctccaagtaccccgggaggaatggtggcgatggccgccccaaacttggggaacattgataagaccagagctacaaaagcagccacaatataggcggcggtggagtagacgcgggttgcggccattaccccaatattttccgcataggtggtggtggcgctaccgccgccgcaaccggcgaatacggtagaaatcccgtctgcaaacagggcgcgcccggtcaagtggtctaggttttccccggtcatcgcggatacggatttaacgtgaccgacgttttcagcaatcaagaccagcactaccgggataaatagtcccaaagtcgaaggttcgaaagagggggtgtggaattcaggcaggccaatccaggcggcttcgccgatggctttgaagtccacttcatgttggattaccgcggctatatagcccacgcccacgccaatcaaaatggacaagcggccgatgattcctttgaaaaggacggtgattagcacgatggaggtgacggtgattacggcagtgaccgcgccctctttaaaccaattccaggcggccggtgccaggttgaagccgattagagctacgatacatccggtcacggtaggcggcatgatgcggtcaatccacacgatgcccgcaaaatgaacgattaccccgatcagtgccaatgtaaccccgacgctgatgaccccgccgagcgccgctgactgtccgtactgggaagataccgcggtgatgggggcaatcaaagcgaaggaggaacccaaataggagggcagtttacccgcagttaccagcgcgaagagcaaggttcctatcgcggtgaagaacaaggtggtgttgggaggaaagccggtcagcaagggcaccaggaaggtggcaccgaacatggcgactacgtgttgggcgccaatgcctgcggtgcgcggccaggagagcctctcacgaggcattaccacttcaccgggtccaatagagcggccatcaccgtgaagtttccagaaacccaggagagattttttctggggttgctggggggatacagattgaagattctgatcgttactagacatttcgtccctatcagctaggagaccccgcccacaggggcgcgagtctacttaagttttacggtcagaacttaactttattcccttcagggcgcttaagaaaagttagcccaaaattcgtcctcgaaaaccattgaaaacataagaatctggttttatagttagcctattgattcatcgtcaaccaagttgggagattcctattatgtccactttcaaaagactgtccggagcactagccgccaccgccatgttgatatcgggaatagtttgtgccccagctgcacaggcagctccttcttgcccttctggctacgtgtgtatgtggaacggaattaacgggaccggtacgaagttcaaatattcctcatctgcaaatcacacccatcaaatccactcagtctattttaactatagaacaatgggaaccaagtttacgagcgaaagaaatggcaagggatatagaattacgtactacaccccctctcaaagaggttttcggaattgggatcgtataaactggaaagcttgtcgctcacaccaggactttaagatttaatctcgaattgcaggatccgtatgagagccaaccatgcgctgaaaatcttacaaatactctgcggaatttcactggttagctttatgacggcgtgcgcttcacaaccggttgatgatagcgccgagtggactcctagtaaagctgctgtaaatagccacatttatctaagcgagaccaacgctattctctatcccccacaggcagaaactaaccagttgcgtaacgcatattatgccgcagttacatcttgtatgcagaagcaaggattttcttatactcccacagacgccaattccccatcattggatttgatttcaatgaacgaaaaggcaattgaaaatgtttatgaatatgtctcggaagaagatgcggtaaaatacggcgtcgcagttccaggatggtatgaccagaatgctaaagctgcagacgataaaattttgtctcctgaggatcgggcgctctacggagacgaaaacagtaaaaacccttcaggatgtgtaaacgaagcaatgaaagaggtacttccaaaatataaacgcatggtcgaactagagcaggaagcaaccaacatttcattacaagccacagacgcaatctccacaacgaaagacaaagctgcagcagcttggaataaatgcatgaaaaacgagggatacactcagtttttatctccctcttccctgtctagcccgaagggggatgaggctcccgacctgtcctggccagcaccaaatcccggtatagaagaaataaaggcagctcaggctgcttctcgctgtatgttaagcaccaggtaccttgaaaaagtttccaaagcggaggcactagcggtgcataagatattagcgaagaaaccagggctaatcgcggagtggcaagaattacgtcaagatagcctaaaaaagagtaaaaatatttccagagaaaactaatattttttccccacgacttaggatgctataacttgaaattattgagccgcagtaaacgccgagttgcgtggaaaacagtcatttttactgctagtggagcagctatatgtctgggttttgttttacttctgacgctgagtttcttatccccgtccaaggcgcgtcctatctctagtgctcacccggtcgctaccgcgaaagtagaagctggaaaactatctcgcacgctaacaggaacagctaacatttcgtcctctagcgaaagagaaattcctctttcagttagaaacgaggacgaagtaggggtgatctcggcggtgccagtcagcgccggaaaacctgttccgtactgtcatgctttattagaaatatcagggcgtcctcttttagcgttgaacggattaatacctgcctaccgcgacctccatatcggcgacagcggcaaggatgtcacccagctgcaaaaagctttgaatagctgtggctattcggttgcagcagatggacagctaggaaaatacactgcccagctcgtcgcgaagctctatcgaaacaacggttatgctccggcccagaacccgaagacacgaaacgcacgtcaggatacgcctggcaacaaaccccaggccgaatcggacaccaatagcactgaaaatgaaactgcctcagatgattcattagttatcccccgcagtgaagccgcctttatccctgccaattccactattaccgagctgcctgatttgggtagctatctgggtgagaaatctagtgtgaaaatcggggtaggcgcacccttagcaatcctggaattagacgcaaaacagatactgaagctgcgcgaaggtttaccgataaaattggagtctggtcaatggaataacgagaccacattacccgcaattcccaactcccccgactccaatgataaagatgaagaacaaaactcacagccaacatacactctgcgtattcccttaaataatcccccaaataatgctctaactacttgtcaatggagtgtgaccatcggttccaacactatttatccgttcactgtgcccgcggcagcaatccgtgaggataacaaaggaacctatgtgcaaaagaagaccggcgattctacccagaaaacttatgttgaaattatcgaaagcggagatggagccgttgctattaaaggggcagtaaaaactggtgaaattgtcttgctgggagataaataattggactctaacgctcaggttaatacatctgatatagcccctccgactaccaatgagccccctatcctagaaatgcataacttaaaccgtaccttcgggacaggaaattctactgtttatgcgttaaaaaatgtgaatctaaaaataaaaaaaggggagtcagtagtaattaccggtccttctggggcgggaaaatcaactctcctaaatatcctagggttattagaccctaactacgaaggcacgttaaagatacaagggaaggattgcagtaaactaaaaccagcacaaattgatcaattacgagctgatcatattggttttatttttcaggatttcggtttaattccttacctgaatgtaatacaaaatatcgagttgggttttacctacagtaatctcgaaaggaacatacgaaaagaaaaaacactcttttgtttatcggcagtggggctagaacaccgagcaaccgctcgcattagcaccctatctgggggtgaaaaacagcgggtagccattgcacgaaccttaactagatcgcccagtctactgttagctgatgaacccaccggtaatctcgatcaagataattcccaaaaaactattgaactcttattgcaggtacaacggagcagcggatgcgctctggtagtggtcacgcatgagccagaagtgcgcgcccacttcggccacggttatttggtggtagatggaaacgtggagcagatcgattatgacaagagttaattggggactgctactacagcaatctcttggtgccatctggggcagaaaaatgcgctccgtcatgaccgcgtttgggataaccgtggggattctagtttttctggtcaccttaggttggtctctctccgccagtgcagacataaacgcaactttcgatgagcgtacagcgactaccataaccgttactgcccgcgaagatgctgagcaaatactagataaaaacttcactgacagggtaacgaaaatgcagggggtaaaagcagcaggacgttacagcgccgcacctcaagccgattgccgcactcaccccggcgaaactcaagccacccctataatcgtggctgatcccgggtttttacaagccagtgggatgaaagtaaagagcgggagacttttcgataaaagcatcgagaaaattccggggccggtcgccttattagggccaactgctgctaacaacttgggtatgaccacaactgacggcaccacaagaattatttgcgatggcaaatctattccagtgtttggggtcttatcctccactggccaggccgcaggcgcaagttcagcggtaattatttctaagaatctagacggcagcgatgtgtcttatcaagctggaaacggacttgctggcgtggttgaaaccgagttaggtgccactaagaaagtggctgctgctcttccgtatgcagtatctgccaggcattcggaactagtcgcagtcagaatgccaccaagcaccgaagaactccgcggtaaagtaacaacttcattaaacacaatggcaatcggggtttctattctttccctagtagtaggcgcaataggaattatgacaactacgctaacctcggttattgaacgcactaccgaaatagggttgcgtcgttctcttggggcacgtccgcgtcacattgcataccagtttattatcgaaggagtgtttcttggaggcatcggcgctttttttggagtacttctcggcttagtgtcactgttagtactagtcagactacaagggtggacgccagtaatgtatccgctaataccgctgctattaattcccggagggatgataatcggaatactctcatccctggttcctgccttacgtgctgctaaaatccctccagcagccgccttaagacactaaagaaatagatccctaaaaatcgaaacctagtcattcactccctgctgccagcaatagtatgggtgtatgcaaaaaaaactggtttaccgcgacgaagttgatgacccgattactttgccggatctgagcgacccggaagaaactgctcagttcttgcggtcattgccggatgtttccgacaagtgtccctcgactgaagctcaacttattgagacgatggggatccgctttcaccacttgggcggggaggtaatggtttgctcaatgccagtagagggcaaccgccagaccttaggggtcctgcacggcggcgcgaatgcggtgttgggggaaactaccgggtctttggctgccaactacgtggctcccaaaggcaaacacgcggtaggggcaaatatcttcgtcacccatcatcgtccggctatcgagggccgggtgtattgcgtggcgactttagcccaaagcgggcgcaccctcgcgacctatttcttgcagattttttccgaggacggcaaactcacagcctccggcacccacacctgcgcatttgtggatgattagggcgaggctgcgcaaaaaactgatttcgatattgcacggatattgcacgcggcagcttcatgagacaacgcagagacaacgctgggagattttttaacttgaccgttgcatttgccttggtcagagccatttatttggtgcgcaaggggggacttgaacccccatgcccggtaaagggcacacggacctgaaccgtgcgcgtctaccaattccgccacttgcgcttaggtttaacgcccggaagcgttaaccaacgaatagaaatctaccctgaaaccaaaggcgggagcaagcccacagaaaaaaggcgtcacgtttcacaacgtttaccgccaaaatttgcaactcagggcggattctctctgctgctttagactttttcaccccgccagcacgcctaatatcgccctattcaccctgcgataatacttctcagacatttttctattaccctgggtcttaggtgtgtttgctgcgcgctgtttttaccggcaaaatctgccagataaaaatagcgccgcaagatgcttcagatctggtttttacaggagaggacgaaaatatgggagtggttgaccgcttcgaaagagccgtttcccagggggtaaacgctcctttttctaaaatgttcgccagttcaattaaagcggtagacgtaaagtcggcgattcgggaaagcatggacagctcccgcgccactttgagcgatggccgggtagtagtgcccaatgagtaccgcgtactccttaatgaaaaagacttccagtcggttatggatcagaactcgcaggtattcgcgcaagaattagcgcaagacgccacttcatacgctacggaacaaagctacgtgttcgtggggccagtggaagttactttttctgccggagaatatccgctgggagaactaaaaatcgaaaacgctatccggcgtggccccgctgccccggtgaccactgctggcgccagtcccgcccatccgattatcgatatcgagggacaacagtggctactaaccgaaccagtcacggtgatagggcgtggatctgaagccgatattgtggtacatgacccgggagtatcccgccgccacctggaactgcgaataacttctcaaggagtaatcgctaccgatttaggttccactaacggatcctatgtggaaggtcatcgcatcagcgccgccaccctgttagatggaaacgaaataactatcggtcgcactcacctgctattttggacatcaagcgcggatgaataataggcggtaattgtggcggtaggacttttatacactattcttcgattcggtttcgtagccctattatggctgctggtaatcggattggtactagtgctacgccgcgatattttcttggcgtcctcggcatctgcaaaatctcctctccgaggctcgcgcgcacggcgccctcaaaataagaagagcaagccccaaaaatccaaacgcaaaggccgtcctcgctacctggctttcaccggtggcgccctggccggaaatcgtttgaaacttgacggaaaccccattctcttagggcgctctggcgagtgcacggtacctctgaaagattcctactcctccaatagacacgcgcgtatctacaacaacaacggacgctggtttattgaggatctgaactcaacgaatggaacattcgttggcaacaaacgcctcaccaccgctcagcccctcgagctgggagtcgtggtgcggattggacaaacaacaatggagctaactagatgagcatcggattcaactatgctgccctctccgatatcggtaagatccggcaatctaaccaagattcgggttacgccggtccaaatctgctgatattagcagacgggatgggaggcccagccgggggggatattgcctcgtcaatagctatcgatcatgtacgcggcctcgactccttagccgaaagccccgaagacgctctagaaagcctccggacagccttagggcaagcgcatcaggaactttgtgaacgctccagccaagatcccgcgctggccggctttggtactacctgtatcgctattcgccgcagcgaaaatgctctgaccatgacccatatcggggattcgcgcgcctaccggctgcggggcggagaactgcggcaaatgaccaatgaccattctttcgtgcaatacctggtggataccgggcaactcacccaggatcaagcagaaaaccatccccaacgttcggtactactacgggttttaggggattctcaagaggacgtaaatctcgacgaatctcatcccgaactcaaagttggtgaccgctggctgctgtgttcggacggcttgtgcggttttgtatccgggcaaaccatcggcaaagtgctctatcacagtgaaaccccgcagcaggcttgcgaatctttagtggaactggcgctgaaagccggcggcccagacaatgtgacctgcgtagttgccgacattgtggaggacgccccgcaaagcgagccacaagtagtgggagcggcggccaccgaccggttagcgcaggtgcgcagacagctggatacgctttccgaagacaccttgtctgctagtcccgatagtcccgacccggccgctactgatgcccgggacgaggacgagtctttttctgcggcgcgggcggcggtaccgacggagcccctagaggaggaaacccaggttcctaagttccgctggggtcgaatcatcggggtagtcctgggactactggtcttgattgggctgtttttgggggctttgcggtacgggatgtcttctcgccccacccctcctccgactgccactttgacctcggtgtccgaaaccgaatctactgatacttcgccccagaaagaaaaaactgaaactgaaaatccttcgcagacggaaacctctaaatctgctcatcccgataagtcttaagcggcaagtgataaccgcgagttaagaagttaacgcggttccagtaaaggaaaggagggacagcgcttttggtaaaaataaaacaccccactggccgactggcagaactgcttttaatcgcagtagccttagcggcctgttttgctggatacttttctattaatgtcaaccgtaccggcgctcttcctacctcctttgtactgcacatttgtatcctggctaccttcgccctcgctacccacctagcagtgcgtttcttagcgccctatgccgacccggtgctgctacccgcggttttgatgctcaacgggattggcctagtgatgatttaccgtctggatctggcttacggtcccgagtcccagctgtatgtgggttttaagcaggcagccttcaccctgctcggcgtgattttaatggtggttactttggcggtcgtgcgtgactatcgcaagctgcgtaactatacctatttgtcgatgctgatggcgatagcgctactcctactaccgctggcaccagtgattgggcgcaccatcaatggtgcccgcatctggatttatatcggattttcgctacagccttccgaaatcgccaaaatttgcttggctattttcttcgccggatatttaactacccgccgggaagcactaatccaaggcgggaaatcgctgctgggaatgcgcttgccgcgcctgcgagatctcggtccgttagtagtggtgtgggcagcctctattatgattttggtgttcgagcgtgacctgggaacttccctgctaatctttggtttgttcgtggcgatgctgtacgtggccaccaatcaaacctcgtggctgcttatcggggcgatccttttcgcaccggcagtagtcttggctgcccggatgttttcacacgtacaggcgcggattgatgtgtggcttcatgccctcgaccccgagatctattcccgcgccatcggtggttctgggcagctggtatccggtcttttcggaatgtccgatggcggaatcttggggactggttgggcgcaggggtctccttcgctcactcctttcgcgaactccgattttattttcgcttctctcggggaggaactggggttaaccgggtcgctagccatcctcactctctacctaatttttgtggaacgcgggctacgcaccgctctgattgtgcgcgacagtttcggcaaactattggcagccggttttgcttttactatcggattccaagtgtttgtagtggtaggcggcgttaccagagttattccttctactggccttaccttgccgttcgtagcggccggcggttcctcgctagtagccaactgggtgattctggctctgttgctacgcctttccaacgaggcacgcaaaccggtaactaccgaaagtggggttattgatactgccgagttagaagcggtaattgcccgccaacaggataaacactccgtgaccgagctggcagattccgagtctccccttgttgcggacgcgacttcggttccccctcacgaaacccaaaaaccagccacctggacacccagagctgcgcgacgtcgcccaaatcatcccgcaccaaatgcctcctcccacctccaacaaccttttgggggtgaccgccatgaatccgcagattaagcgacttttcctcgtagtttttgtcatgttcttgtcgctgatggtggcgtgtacctacatccagttcctgggggcagattctctcaacgcagatggacgcaactctcgcgccttctaccgttccaaatatattgaacgcggccctattatggtgggcgaaaacgcgattgcatcctcccaacccacagaagactctaccggctatcgtaagcgctaccaccgggtttactctgaccaggctccgctgtactctaacctgaccggttacctctccccgggcggcaatgctaccgggattgaacgactacaaaactcggttttaatgggggaagcctctagccaggctctatcccagatgcttaagcacgcggcgggggaaaatcagaagggcggaggggtacgcctgactgttaaccccaagattcaggaggcggcggcgcaggcactagggaatcgcaagggcgccgcagtcgcaatcaactaccagacgggagcaatcctagcggcggttactacccctcgttttgatccgaactcgctagcgagtggcagcgaggaagagtcacaaaaaaccttaaaagggctgaactcagacccggcaaaaccgatgctagatcgcgctttgcgcggggagtttgcgccgggctcgtccttcaaaattattaccgctgctgctgcactcgagcagggaattcgctctcccgaagaccaagttgatgctccggtctcggtgcctttgccaggttcaaatgcgcggatttctaatatcgagtccaccaactgcggcaacggtagcccgacttttagttatgcttttgccctatcttgcaatacgcctttcgctaccattggtcaggacttaggatatgaagccttaaaacaacaggctgaagatttcggcttcaacccaaagtccgttttgaacgtgccgctaccagtgcaaaagtcctatttccccaccagtgatcccgggctggctcccacaatgatgagcgcgattgggcagtacgaggtgcgaacttctcctttaatgatggccaccgtagccggggcagtagcgaatcaaggtacccaggcgcgccccttcttagtggcgtccgaactgggaccagatggtaaggaaacgcgcaactaccgctccggcggcactatgggtaggcctatttccaaagaggtagcccagcagctacgtgaaatgatgatccaaacggtaaccgaaggcaccggtaaggcaggtagtgtttccggggtggaaatgggagccaagactggaactgccgagattgatggtggcagaaccgacgcttggtatgtgggttgggcagatattcccgactatcccctggcatttgcggtggtagtagaaggcgattccgctaacccggctccccacggcggaccggtcgggggaccgattgccaaaaccataattcaggcggcgatgaatcatgactgatagccgcgttttacctgccccgccgcgcgggcgggaagcagaaatgtcaactccccttgacccgattgctacttctggccaagacgcgaccagcgcccaaaaagcgattgccgctttgaaagtggggatgaagattgctggtcgctacctgctgctttctcgtttagctatcggcggtatgggggaagtttggcaggctctagatgaaaaaactggcgaacgtctggcactaaaaattttacgtccagaactggccggaaagaaacttttcctctcgcgcttacgaatcgaagcctacaatgcttcgcgggtgcatcacccgaacctagcggcagttcaggcttccggtgaggacggcgggctgggttggatcagcatggagctggttgacggggtttccctaaccgaaatcctggatcaggaacacactttagataccgattttctgctttcggtgttataccaaaccgctgacgccctcagtgcggtacatggagccgggattgtacaccgggacattaaacctggaaacatcatggttactcctactggagaagtaaaacttaccgatttcgggatttctaaggcaccgggtcaggctaatttaacccaggtgggaatggtgatgggtactgcccaatatctgccccccgaacaggcgatgggtcagccggccacgcctgctggtgacctctatgccctagggattatcgcctatgaagccttggttgggaaacgaccctttagcggggaaaagccggtagatatcgctttcgcccacgttaacaaaccggttccggctctaccagagtcaattccgtctgagatgcgtgaattggtgatggagcttttggaaaaagaaccgcaaaaccgcctggccagcgcagctgatttaatgcggcgcctggaggaagtacagcactgtctggctcatccgcagcttaagaaacaggaacagactagcgcccaggaatcaccggcactatccccgcaaccagctgaggcggcggctactgccgctgaaactgaagaatcctctgcgcaagctgcagatttagaaaacttccaagaagatatggaagaactagccgagctcgagcaggcgaaccaagactccgctgccgtggcaacagttgctgaagaggcgccacctatcgctgctgcgtctgctcctctgcctgccgcagaccccgctgccctggcagcttcccccgcccccagctggcggcctccctttgccacctcgtggccgaaagaagaagacgggtcgcgaatgctctatctatccggaggcaccgtccccgcaccccaggtacttcctaactcgattcctcttcccgagggcgcctggggtcagcgcctgcggcagcggatacgaccccgcgagtttgccgagctcatcccgccagtttccgcatcccgtccgcgttcccaaatacaacgcctacggtacttgccccaagtttttagttggcgtaaagccccgactcctcctcgttacgtggcacccggcgcacccgaaaccgggaaagcctcatcttcgctggctacaccgttagtttcctggagccatagactggaatctcagatcgggctgcaaccagccgatcccctagacgccgaggtagcccggctgcgccgtccctacgaaaaagtagcgatcttcagccgaaaatggtggaaccaagatgtttcgcgagcccgacacggacggcatgatcagcggtgggcgctacctctaattttggttactctgctcctatggattctggtaaccaccctgagcctgggcgctggcttactgttttcggcggctaactccccggcaacccccacccaaaaagctatgataaagatagtttcggaaccaaaggaagacacatggcagattctccataccgcataggcggaggccgctacgagatccgttccctgatcggcaggggcgggatggctgaggtacaccaggcctacgacaccttgctttctcgcgttgtcgccatcaagatgctacgcattgacctcgcgaaagattcggtgttcttaactcgtttccgacgtgaagctttggcgtctgcttccttgaatcacgagaacatcgtccaggtttatgacaccggcgaacaggtggtcactaccccggaaggtaccgaagttcacgttccctatattgtaatggagctggtagagggacacacagtccaccaattgctgaccgatggacaaccggttcccatcaatgaggcagttgagattatgacgggggtgctcaacgccctcgaatattcccataaacgcggactagtacaccgtgacattaaacccggcaatgtaatgattacgaacaccggcaagatcaaggtgatggatttcgggattgcgcgcgccctagaagattcggggcagaccatgaccagcacggatgctgtggtgggtaccgctcaatatttgtccccggagcaggcaagaggggaaaccgttgatacccgttctgatctttactcttgcggctgtatgcttttcgaactgctgaccggtagggccccttttaaaggagatttcgcagtttccgttgcttatcaacacgtagcggagatgccgccactaccttcttcgattgcctccgatatcagccccgagcttgatcggatggtaatgaaatctctggctaaattgccggaagaacgctatcaggatgctgcttctatgcgttcagacatggtcagggcggcagcgggcgccgaaatttctgccccggtgctgcctccgttaccagttagtaccccaactgaaggttttatgcagccgcatgcctcctatccacctgcccagtggtcacaggtaatggaagaagaccctgaccaggaagaagaggacgaggaggctgcccgcaagaaaaaacgtaagaagattatttgggcagtagttattgggataatagttgccgctgcgctgatagggctgatttggtggctgatggcttctggtaagaatcaggaacccgagcaggtcaccatcccgaaagaaattatcgggatgagcgcaattgaagcgcaacgtactcttgaagatctgggattaaatatggaacagggtcctgctattgcctccgatgaggtagacaagggtaaggtcgccgaaactgatcccgaaccgggaactgaagttgaatccggatctacagtaaccattcatttatcttcgggagctgccgaaattaccgtacctgacgtatctggacaaactcaggatgccgcccgaaagaccctagaagaagcaggtttgcgggtgggatctgtcaaatacgaggatgattctaaaacagcggccgagcgggtgatccgtacaactccggaagcaggcagttctgccagtaaggatgatgaaatcatcttggtgctgtcctcaggctatgtttctattgactcctctcaagtagtgggtaagagccaacaggaaggattaaggtatctggctggtctaggtttacagaccaacacggtgacccaggaaaccagccagactcccaatggacagattatttcggtagagccttctggcagggtaaaaaatggtacttcggtgacagttaaggtggcaaaaaccccgccgcagcagtcaagtgcaccctcgcagcctgcaaataacagttccgaagagccgactgaaccaaacccctaaacccagggataaaattctagagggcgccgcccgagccatacccaaggggactacctacggtggttccagtgagatccagggtctcggaaatccaggggaatagccaccaaaagcaggccataatgattagggcgattatcagcaccacctgcaggaatttcagccacttgggaccgggaagtaaatcccaaattaacccgcacatgcgttgcctccttctgccagttccttggggataccgctgttacgaggcacccaatggtcgaagctcagatgcacaatatagcgttcccagttcccatactccgggttacaggtagtcatagtcattagccgctcggtgggctgctcccccggcttttctggtaccggtaaaatcacgtccgattgggtaggtcgcacaatcttgtggttcctcaccttgtagattaaccactcattctcggtttccatgactacggtgtccccgggtttcaatacgtcaatgcgccggaagttagatccgaaagatctgcggtgagccgccaccgaaaagttccctatttgtccaggtagcgctgtagtttcatagtgtccagcagctccggtattcaaaatcagttgagtggtgccttccttaactggaatcaccatatagttccatttcggaacgtgcagggcccccagagtctcattttcttgtttaatcccgatactggggggagcgcttttgcgctcgtcggtggaaacacgattggggcagctcttagtgctcttctggaaagaatccaaagcctggtgattgtagctggccacctgccagtcggtgacaaaaacgtcccaaaatgcgaataatccgaacaccagccccacgataatcagtagttccccaaaagccgcgatggggtcgaagcggctacggcgtttttctttttctggccgtgtttgcttggtttttctactcatattcttccgagattcgtctgtttggacctgcgggcattattccctgcttttatcctagacttaatttaccggaaagcagacttaactatgtctctagcgctattcccactagaatgggtctagctaataaaatcgtactttttggaggtactcgtgccggagtctcgtaagcgcaagggcgctaagcctcaccgctcccaacagccagaagagttaaataagtcttgggctgctgatatgaagccatctcctcgctggtgggcgcctctttcagtgtcgttgatgctgattgggttggttttagtagtggtttactatattacttctggtggctaccccatccctagtgctggcaactggaacctggctttgggtctgggcgttgcctttgggggcttcttaatgttgctgcgttggaagtaaggtctaaccctctttccagcattttctttcttctgggagggcgcgcgtcctctttacgtcgacactaatagtaaccggcgttaccgaaacatttcgggcaaagtgtttacattcctggcttattcctctattgttaataatgtaaggacaaaggaacgggagtttgttactcccctgcacagaacagagttgttttatgttgaaatttggattgctgggagccggacggattggtcatgttcacgctaaaactcttgcggccaaccctgatgcttctctagaagtagtttttgacgtacgccaagacgcggctgacgaattagctaaacaatacggcggacgcggagtaacagatgaaaaagaaatttgggacaacccggatattgatgcggtaattattggttccccgacaccgctacacgttccccatatcatcgccgccgctaaatccggcaaagctgcgctgtgtgaaaaaccggtggccatggaaaccgccaaagttgaggaattgcgcgaagcccttaagggactaaatcccacggtgatgatgggattcaaccgccgctttgacccttcgtttgcacgggtaaaggaacttatggataaaggcgaaatcggtcaggtggaacaggtaactattatttcgcgtgaccctgccgcaccgcctgccgactacatcaaagtttcgggtggaatcttcaaagatatgaccatccacgatttcgatatggcgcgcttcctgctgggcgatgtcgataccgtcaccaccattccgcagaacctggatccagagatcgccgcttgcaatgactatgacgcagcagtgatcgtactgaccgctaagtcgggtgcagtagccaccattatcaataaccgccactgcgccaccggatacgaccagcgcttagaagtaaccggacgtgagggtcaacttaatgcagataacatgcgtcccaccacgatttcgctgtccaaagatagctattcgctttcccgcgagccctatctggacttcttcttgactcgctacgccgatgcctacgcggctgagctcaacgagtttatttccatagttaaagagggcggcaaacctacaccctcgatcgaggatggagcccaggcgttactactggcagaggcagcggaaaaatctgcccgtgagcagcgcccggttaaggtcggcgagtagaccttaggtatcgctttccacagcgtctgtgggcgagaaaagcgttagtgtccactgggatatcaataaaaaaacaagcagtaaaagataactaaaaattacaggtcgcgtaaaagacgtttcacctggaaatcaataatggaggaaaatatgaagattgcgggagctcctatttcttggggcgtatgtgaggtaccgggctggggatatcaaatgacccctgagcgcgtgttgaccgaaatgaaggaaattggcttaaccgccaccgaattcgggcctcagggctggctaccgattgaggctgctgctcgcgcaaaagaggtaggcaaatatgacctcaagccggtaggagcttttttcctggcaattatgcacgatcctgaggttgaccccatcccggcagtaaagaaagagctagaagcattcaaggttgctggaggggaatacctgatcttggcggcagattctggtcgtgacggttatgatgaccgcccggtactggatgatgaaggttggaagaccctattcggaaatttggacaagatcagcgatgtttgcgccgaggccggagtaaaggcttgcgtgcatcctcactggggaaccatgattcaaaatgacagtgagattcgcaagatgctggacgaatccaaggtggctctctgcttggataccggacacatggtttgcggcggctgcgacccggaggcaatcgttaaggaataccccggtcgtaccgtgatcgttcacgcgaaggacgtacacaaggaaatgaccgataaactgctgcccggtgagatcacctggtcgcagggagttaaggccggaatgtttgctcctattggtgaaggcgatattgatttcggcaccattgtggcggaactggataaggccggcttcgacggctactacgtgctggaacaggacatcatgattgatgaggagcctcccgctggtggtggcccgaaagctaatgcggagaagtccttaaaggcactgcaaaaactggctagctagtaaaaaggtagctagttaactaaaaagtaatggttgggggttgcaactaaggttgcaacccccaaccatttattaatactaagtctttacttttagcgttatagcttaagtcttttctgtttcttcgcctctagttgctgctcgccggcagatactgatctggttattgcagcttataaagcacagctgctgataacctatgcaacaagcagacagccacagccgcctgcagcaaccgcgaacttagcgagtttccttgtgtacagtggacttgcggcaacgcgggcaatacttcttcagttccaagcgatccgggttattccggcgattcttcttggtgatgtagttacgctctttgcactcgctgcacgccaaagtaatcttagggcggacgtcggacgacttgctggccattcttatttacctctatgtctcgggccgcccgatcagcggcatttcctatttcaatctaaattgaaaagtagcgagggcggggttcgaacccgcgacctcacgattatgagtcgtgcgctctcaccaactgagctaccccgccgcttgagtgtttgccaaaacaaacctcagagccccgacagggatttgaaccctggaccttctccttaccatggagacgctctgcctactgagctatcggggcaacagtgaataaacttgctggactaagcgatgacttaaccgccctgctgcccagcagttttccactctgccaccaagtccgaagacctggcaacgtggcgggtgagggattcgaacccccgaaggctacgccggctgatttacagtcagatccctttggccgcttgggtaacccgccttgtacactcaggcaccccaaaagactatcaaaccgcgttgggcatacaaaaatgctagcaaggaaagttacccacttcaccgaatttttgtgtgtccacccttcaaactttatttttttctggaactaacaccggttttgcttcctcggcacttaaaataagcatcgcgttgatagccgggagggtaaataatcccgagcacactaaaatcaaagcacctgaatcattcgttaatgccgcgagcagcgaagttaatatcaccccttgtgcaaagcggtaggctcccggaactggttccagagaatgagaagcagagatacctaagagactgcggcgtttagaggaatatccgggtctactgcgaacaatcttgaagacgatgaccgcgaccaccaagaccattaccaccgtgaacccgatggggcctccgaaactgttaatcattgcctgcgctttgcgggcgacaataattccgccgcctccgcctcggacttcggaaatgaaacgcccaaagtgggtgcgagcagtgggacttgccaccttgtccaccagcacgaatacgcttgaggatagcaaagccgccactaccagaaccgccactttccctactcccacttttctaccgagaacccagttcaaggtgatacccactcccaggatcatggccaacggcccgccgacatctgcccccaaccaggggaaaccatcaaggactaccgccagccctagcagggagaatccatagataaaatagtgacggcctttgtgtgggaaacgcgctattagcggcgcgaaaatcaggcactgtaaagccaggacggcagagaagaggaaggaatacttgttgttatttagtccgtagaaacgggtagcagccgtggcagcggaggaaaacatcgcggagatttgatctggagaaccgctgagtaggctcaccataatccagaccatcaccacgatggcagctactaatattggcgccgagtaacgcaggtaagtccatttccgggcaatcagcccgcccccggcaaagcagagagcggaaaatactccggcgataaataacactagcagcagaaattgggcggtgaggatgggagcagacattttcagggcgttggcggtgaaatttccgcccgttccccccagcattttggtcggcgtataagccgcaagggtgcttgctggtcccagcaggctggcgcttaaacagattccagccagtaatttgcgggcatgcggggaactgcgcaacttttttcgtcgcaataagacccctaaaagaacagcggaaagcagcaggataattccggtgaggacgataaagcgcgcctgaacgatagtagcctgatcggcgcgcagcgactgattacggagccagtcaagatttccagccaacccatagtcacgttcagggctaaagtctcctcctaccaggtagtccgggatatttgctccgctaacctccagaatttgtctggtgaagtccacagtggcaagtagtcccaattgccgggtagaagatgaacgtaatattccggtcttggagccgggttctcggaaaaaagccattcccaggtggggggtggcagaatgatcagccacatctaatccgaagattaagtcgttgtcgctcgctccccgcaaagcagccgtaagcgtctttaatatctgttcgctgtggggtttacccaccctatccacaccgggtaaaccatcggcgggagtagcgtttagtgaagtgggggaaactttaatctctgcactggaactgaccgaaccaacatccacaacggtcacgtcgctatcttctagcgccgccttcacctgcgaagttagccgagaggcatctgcccgcgaactatatttagccatcttgccggcactgtccatagtcgcgatagctgcaccttcaccgatagctcgcaccctagtgccgttttcctccagactttgccctaaagttccgggaagggcttgttcattttgtcgggaagcatcgtgcctccaggagtttatggagctggcgggaactgtgccactggacaggtcaggaatatccggacaatgcccactggctcgtccttgggtggcagtcacccgcattccggtcgacaaggtgagatacccatctagggggcaggtagttttggcggcgttatgtcgcgttaagttagcgagggtggctggacctagagcctccaggaactctttgccactctcttcttgcgggttgacatctgaccaggaaataccggaggaaaccagtactagtacgcggggatgttcgcgcgcctgagcgtgcagaggggtaagtagcgctatcgcgaaggtaaatatcaagagggcgatagcgcgccgcgacacgcgggagcagcgtttcttcacgtccctagcatatcggtcttttgtttgcgaaagtgcgagcgtgcgtcctcgtcctaaaaaatcagctgtttgctgtagaacagtagaacaacagggatcttgaggacgcggcagcgaacgaaagagataactgccacagaccgccagaagattttgcataattattcgtagtgttgcatactttctacatagctattgattggagatatcatgaaacgcaaacttgcggcactggccgccatttccctaacctcgcttggcctggcagcctgcagctccggcagtggaactgccgccgatcccgcagctgatccaggagaaaaaggcttcgacgtatcgaccattaaagccgaccccgccgtagaaaagctggtaccggcagacatcaagaaagccggagtgctaaagaacggcgcctcggtggactacgcgcctgccgaatatatgaaagctgataacaagactcccaccggttatgacgtggatatggtcaaagccattgccaaagttatgggactaaaggacggcactaccactcacggtgagtttgattccctgatcccgcaaatcggaactaaatacgatatcggagtttccgggttcagcatcaccaaagaacgtgaagccgaaacccagatggtttcctatgccgaactgggattctcttacggggtagccaaagataaccccaagaagtttgaccccaagaatccctgcggcaagaccgtcggggtacagaccggtaccgcccagcaggacaccattaaaaagatttctaaacagtgcgaggcggacggcaagcccgcaatcaccgtaaaagagcacaagatgcagaccgaaatcgtccccaaggtcaccggcggacagtatgacgcggtgctcgccgattccccggtagtgggatacgcagtcaagatgagcggcggggaactggaacttatcggtaacgcttttgaaactgccaaacatggcgtggtcgttaacaaagataacgaacagctggcgaaagcggtacaggcagcactgcagaagctgatggatgacggtactttgaagaagatcttcgcggtttacggttccgataacttcgtcctcgacaaagcggaaatcaatcccgaagtttccgagtaaatcctcggggtttagtctgtaaatatggatagccaaaaaattaaagatggcgctgcgctgaccaggccgcgtccggtgttttcgccggggcgcctggtcagcgcggttgtagtactgattctggcggccatgctggtgcatggcctggtcgctaatgaaaagttccgttgggatcaggtagccatatacctctttcaccccacggttctgcgtgggattatgtggacacttattcttacggtagtttccatgctgattggggtaatcctggcggtgactatggcgattatgcgccagtcccctaacccgattatgaagggggtttcctggacctatatctggttctttaggggaactcctatctacacccagctgctgttttgggggatgctacccaccctttattccaccctctcgctgggagtgcctttcggcccggaactgctcactttcgacaccaacacggtgatcagcccggcggtggccgctattttgggactggggcttaacgagggagcttacctggcagaaatcgtgcgctccggcctgaacgcggtggattcgggacaagaggaggcggcgcgcgccctagggatgaggcgcagtcagattctgcggcgaattattcttccgcaagccatgcgggtgattattccgcctaccggcaacgaaaccatttccatgctgaagaccacttccttggtcttggcggtgccctttactttggagattacgttcgctacccaaaccatagggcaacgtctgttcctgccgatcccattattactggtagcagcgatttggtatttgactattacttcgattctgatggtgattcaaagccacattgaaagctactttggtcgcgggtttgatgaacggaccggcggggataagaaactctccggaccaagtaagttacgcgcgatagccgagtctggcactaccaaagacgatcccttcttggagtacaccccatgagctcacaaccagataagcaacccctaatggtggatttgcagcacgtccacaagttctttggcgatctccacgtgctgcgggacgtaagtttacaggttgccccaggggaagtgtgcgtgctcctcggtccctctggctccggaaaatcgaccttgctgcgctgcgtaaacgagctggaacaggtgtctggagggcgcgtgtacctaaacggggaactattagggatggaagagggtgcgccctcgaaaaatcctatccgcgccgccttagatcgtcgccgcggatctatcaccgagcagggtaccgtgttgcgacgcctgagcgataaggaaatcgcgcgccaacgctcccaagtgggcatggtgttccagcgtttcaacctgttccctcacaagaccgcactggaaaacgtgatggaagcccctatgcaggtgaagggaatcggcaaagaggaggcacatgcgaaggcactggagctgttagagcgagtcgggctggcagatcgcgctgaccattatccggctcagctatcgggaggacagcaacagcgagtagccatcgcccgcgccctcgctatggagccagagctgatgctgtttgacgagcctacttcggccctggatcccgaattggtgggggaagtactttcagttatgcaggatctggcgcgcggaggcatgaccatgatcgtggttacccacgagattggtttcgcccgggaagtcgccgaccacgtggtgttcatggacgaaggtaaaatcttggaacaagggactcctgaccaggtaattaaccaccctcagaatccccgcacccaagacttcttctccaaagtactttagctgggaaaactcctcggtttctaggcttttagcgtagaaatctatcaaattagaaagtctcactaccagcgcatatattccattctgatggatttggctagattagactgatggatttggcacttttattagagtcaagccctctgctctacggactataagttttgaatagatcacgaggatccagttgcttcctccagtgattaagtatgacttctcagattgctgctaaccgaacaagctgcacatatgcatgattccggcaggtcgagagcacgcggatagcgactggttttccctcgccctccgcaggtatttctataagattaattttgaggacgcatatcagccttgaccactcccctgcttaggggactgtcgcgcagaagcgaggtaacgggttagatgcgggctcgccccacggaaaacctacctatcacaagcaaaaatctaggagaagtgaaccttgaaacttagaaaaatagctgctggaggcattgctctggcgcttgccttggcgctgacgcccgcgattgccagcgccgctaattcctcagctagcgataacgcccagttcggtttttggctcaatggagaccgggaaaagccggtttacttctcttcaactatgacagttagcgctagccgcgactctaagtccgggaagagtgttgacctggatgccgtgcactatggcgacaccgtgaaagtaaactttagcgcggtaaagaatcccgaaggctatagccaggctcccaagtcagcaaatattacctccggaatctggactgaagaaatggacttctcgaagtacgaaggtaactccgatgatttgagagtggatattcccggtaaagcagatgaagcatttaacccgcaatcgggaaccagctacgaattccaggttccgtgcagcctagaacagcaaacctactatgtaagcggtgatttaagggtcgagctagccgatatgggcaacctgcaaatcatgcaggtactttccaatgatccggagcgtcttttcgcgaacgtgccttttacgattaatgatccagagggcgcggatcggtgtgcagggaaaccggtagcaaccaccaaggaagttaagaaacccaccccgaaaccgactcccactgccaaaaaggggatccttggcaaaaccggggctatcgccctgggagtagcggccgttgccgtaatcctaattgcggtagggggcactattacctggagggcgcggcgtaagaagatgggtgaactgaccgaagaaagctagttacctctaatgctgtgcatcatgctgggcgcggttgttgtttaaagtcaggttttcctcgactgaaaagggcgctgcgcggcattacagtcggactggacaggaacgcggcccccaggtgccgggacgggaattaaaatgtcccgctagggcttttccgcaatccgggcatttgcccgccaccagattatattcgcgcaattgataccagtcgcggcgaatcagctccttaccgcaaccggcgcaataggtggtgtcggcctgcgggtcatgtacgttacccaggtagacgtgccttaacccggcctcgcgggcaatatcgcgggcagtgcgcagcgtctgcaaaggcgtaggcggggtatctaacattttgtgatcggggtggaaagcggtgaaatgtagggggatctctgtgcccagctcgcgcgctatccattcgcattctgcctgcagctgtgcccgatcatcgttatagccgggaataatcagcgtggtcagctccacccaggtggaggtgttatgcaccacccaggcgatattgtccaagatgttggtcaggtgcgcgccggttaaatgccagtaaaagtcctcgttaaaaccttttaggtcgatatttgcggcgtccatgacggaaaagaattcacctcgagcctcaggggaaatataaccggcggttactgcaatgggatggattcctagggcgcgacaggcgcgggcagtatcgatcgcatattccgcgtaaattaccggatcgttgtaggtaaatgctactgcctgcaccgacatttcttgcgcggccgtcgcgattcgcgtcggggtggcggattgcgccaggcgatcccattgccgcgcagccgagatttcatggttttgacagaacttacagcctagattgcacccggcggtgccgaaggaaagcacgggggttccgggataaaagtggtttagcggtttcttttctattgggtcaatgcagaatccactcgacctaccccaggtggcgagcacaatccgttccccgcggcgctcccgcacgaaacaatatcctttttgcccctcccgtaagcgacagtttcgcggacagaggtcgcattggattctgccgtcatctagcaggtgaaaccactttcccggcagagcggtttcttcccctattgcggaagtattcattattcactccaggcggtaaccgtataggtctgaacctgcgcgcgcgcatcccaccaggaagcaggtagccccgctttcattttcagatgcgccaggaattctttaggatcaggcagttgctcccacacttgcggtaggaaggtagcgcgagcgtatccagcattaaggaccaccccgctcacctgaggttttagttggaaaatcacttctgcttcgctgcctgcctgcagagttacccgggggcttaataccgaaacttcaatctggatagcaggcagctccgcccgggtcaccgcgggaaaacgggggtcttggaaagcagcggcacgcgcgttctctatcacgtcgcgtcccaggggacggtattcttccaaactgccgatacacccgcgcaggttcgtgttttcggtgagggtaacgaaactggcaccgtcttcctgtaaccaggagggagtatcgggaattaccgggtctgcctggtctaataacgcagtctggattgcctctcgtgccaaaggtaataatatctttccggcatctgtgggaactgtcatggctagctccttatctcgaaggcggcgtaccctaccactcggtcgctgcccgcatagggggtgtcgcccgagttgtagtttccgattaggcgcggatagattccgcgctgcctacacagctctagcagcccatttagcgggcgcaccccgcaggcttgttccgaagtgagcggcagttctagattttctatctgggaaatggttgctgcatctatgcgttctgcctgttcataggggtgatagtgggaaagatcagaactaactgctatcagggtttgttcatcggcaagagcatcgatgatgtctgcgaccgccctgggggctgcctcccccacatttagcggaatcagctgcacgtcctcaccaaagttctcgattatcagcggaacctgcacttccagggcatgttcttccaggtgagtaagtggatctatggttactttcagcggtaaatcctgggtttgctccagcaccttttgagtgggtaccgataacattcccgctggagttccgaactggtcacagccgggtaaagccactccccgaatcgcaacccgatgagtgggtcccagtaacacaatccgccgagtttctttgcgtcctaaagccgcccggcgccaggctgccgccgccaacattcccgaaaatacccacccggcatgaggtgccacaattgccttgacctgcccgcttacttggggatcatcgggtggtagatccggtcgcacctgcaagtatttctcggcagcttcatttaagatgcgcgcctcagatttaatctctaccacttcctgcggataaaacattccggccaccgccggttcccgcctcagattctctcccatagcccctccctcatcgcaggtggataacctctattttagctggtaatccggggtgacatgagcattttccgcacctaaacaagcagccggggataggtttccactgagcgttctgcacggagggtagatttttcctcctgcccaagaaattcggaaaacgtcgctacgttttccgaattcttatgcccaccgcgcctgctcggataaaatctaccctccgcgcttatatgcagcatgagcacaaggattatgggcgagtagaaacacgcgcctagcaagtgcctgcaatatcgaaccgcaccatttagcccaccgcatatcgccgcatcctcgctttcgcaagaaaacaagcttctcggctacttttaccgtgctatccgagtaaaagttatagatacgggcgaagatctatcggtggcgcccctgctaatttttgaaatggtgatcccctgtcacctacgtaacccacgccagtttttctatcaactgtgtaataagtgtggttttgactaccctgcgatgggttctgccagtcgagcctgatggcaacctgatccccttgttgctggtaaacggtaacagttaaaacctcgccactgctctttaaacgttcttctccgccgtctctcaactcaaatgccctggctgcttgcgtcaattggctatcgctgtaacctttggcttcttgcgctttcttggcttcttcggcttttttagcttcggcctcggcttcggctttggcgatctcagctttcttcgcctcgcgagcgtcggttactttcttaataaactgctctatctgggcatcgtccatgccgtactctttataaatcttcttaagctgggcaatctgctcatcgctaacattttccggactgatcgggtccagcttaaaaaccgtttttgaagcagaacctttagcgttattaccagtagttttaccgttctgtcccgatttatcagactttgtaccattacccgtctgtttgtcaccagcggtcttcttgtcgggaaccgcaacctgcagcggaaccggatccttcggtaccgtaaaaatctgaccatcatccagaatcggggaagcctctagcgccagccgataccgaccagccattaatttaagcttggttttgccaggaaaaaacttaactcgtttatccaccttttccttatctaaatcctcaccctgaacccgaagcggcacaaaggaagactttgccgcatcgtagctctccccgttaacctcaactaacaccgattggtattgatgagccgcctgccaagcagcattttccgcctgctgcttacggtaaaaccaaaaaccagcaccgagcgcacaaaccaggaccaacaccaagatgcagcacacaataatcaatccccggcgccctttggagtctccagcgtcattagaatcagcaccacccaacccaggctgttgtcccaccaccggaggcatcaccccagtcgcatccccatcaccaggaacataagtatcacccatagagtccggacgactatcaaaaccactcgtcataactaatactcccaagaaagcgaagtaaaaacgttaaatcctgcccccatgctaacgccccaaacagcgccatacccagcattctctgtctgaattacggtacaacgcgggggagggatctttccgagcaggcgcggtgggcgtaaaaggggcgcggccggaaagccacggtcttcgccatcactcccccatcgggaacacacccatttagccaccacaacaaattccattcttagcgtctgccaggaatcgaatcagcaggtgtttttatctattcaaacccgcaacttgcaacgcgcagaaacaccaaaacacaggcatcaatggggaagaaagcgctgaaactaggttttcccgagtcggctaggcgggcgtaaaactcggaaaatgcatgagcatttttcgagtttttgggcaggaggggaacctagtttcagcgcgattcaatcaagcatcgatgtcacctttggtgaactgcgcgttgtagaggcgggcgtatgcgccctcggcggccagcaactcttcatgcgtcccggattcgacaatatcgccatgctccatcacgaatatcacgtcactgtcgcgaatggtagacaggcgatgagcaatcacgaacgaggtgcgtcccgcagtagctttggccactgctcgctgaatcagctgctccgtgcgagtatcaaccgaggatgtagcctcgtcaagaatcaaaagcggcttatcggcaatcatggcgcgggcaatagtcaccaattggcgctgcccggctgagagggcggaatcttcacggatctcggtatcgaggccgtggggcagttgcgcgaccagatcactaagtcctatcgctttaatcacttgcgctaggcgctcctcggatacgtcctggtgggaataaacaatgttttcccgtagggttccttggaacatccagctgtcctggagcaccatcgcgaattgtgaatccacgtcctcgcgccgcatcgcagaaagcggggtgccgtccaggagaatttctccagagtccagttcgtaaaagcgcattagcaggtttaccagagtggttttcccggctccggtcggacctacgatggccacgttttgtcccggctgtactagggcggaaaaaccgtgaatgatttctttgcccgcttcatacgagaagcggatatcccggaattcgacttcgcccctagtgtccttgccgttcagcgccggtttttcggattcgtcggacagctcgtcctcttctaggatctcaaatacgcgccctccggcagcagcggcggattggaaggaggccgccgcagacgccaggttcgataacggctgggtgaaaacccggatatagagcataaatgccgcaattactccgatggttacgtagcctttcaccacgaggactgcacccagcacgcataccaccacgtaacccaggtttcccacgaaccccattaccggcatcatcagttgggagaggaaatccgcacgccaggtggcgttaaaaagtcgctggttacggcggttaaactctgcggtggtagaggcagcagcattgtaaatattgatgattccttgcccggatagcgattcttcgatatgaccgtttaggctgcccaggtaggattgccggcgaataaaaaaccgttgcgagaacaccatgatcacggcgttgaggatgaatcctagaactgccacccccataccggccagcgccattcgccactcggtgtacagcatcataaaagcggcgcctaccagagtaactactccggtaatgatggtggtgattgcggaatgtagggtttgtaccagggtgtcgatatcgttggttacccggctcatggtgtcgccgtggctggttttgtcaaaaaaggacagcgggagacggtcgatttttcggtcgatggcggagcgcatccgctgcccggtgcgttgggtaactaccaccattatcagcgattgtcccaggttaaagaagaatcccagggcgaggacgagggttgccatccgcaagagggaaaatatcctgtccatatcgatactgctgcgcagtcccgaggcaatcacatcggttatcaaacctaagaacatcggcataatcgcagtcaggagcgatcccacaatcgccaaaactaccgcaaccaggatagctaggcggtaacgccctaaaaacttggcaagtccgcgcaccgattgcgaaaactgtcccttcttggctttctcatagacgttccccccgtggcgtcctcccgagcgcaccggcgacattttttcttttactggctctagtccgcgccgcgccgactcgactcgccggtcccacctgcccatttctgcgtatttcatgccaactccgcttcggagagttgggacagggcaatttcgcggtagatcttcgaggacgccatcagggattcatgtgttccccgcgccgcgattttgccgtgatcgattactaaaatctggtcggcctcccgcacagtcgcaatccgctgcgccacaataatctgggttttcccgctggctttttctgccaattccccgcgaatatcgcggtcagtcgcatagtcgagggcgctaaaagtgtcatcgaaaatcaggatttgggcatccctagccactgtccgcgcgatcgagatccgctgtttttgcccgccggaaaagttactgcctccttgagctacttctgccgcgaactcgccctctttatcgtcaacgaaatcgcaggcagcggtgtcacccgcctcaacgatatcggcgggagtaatattttttagtccttccccaaaagcgatattggaggcgatggttccggtgaatagggtgatctttgggggcgaatacgcgatttggttgcgcaagtcgtgcaaccgccattcccgcacgtcctggccgtttaccaaaacctgaccttcgcgggggtcgtaaagccggggaatcaagttaaccagagaagtttttccgctgccggttgctccaatcagagcgacggtttgcccgcgcggaattttcagatttatctgatggagggcgtcatcttcggctccgggataacggaaggaaacccctctaaactcgataatcgtcccttcgggatcgagatttgtttcttttccgaggtcgagggcggatttatcgccagtatccaccggatctactagggagggctcgcgatctagcacttcccggatgcgacgattagccacaatcgcacgaggcgcaaatacgaacaccatcgccatcattaggaatccgccaatagcctgggtcgcatacccagaaaatacgatcatctgcgaaaagagggttactttggcggagccggctgctgcggaaatcattagcgcccctagcacatagatcgccaggttaagcccggaaatcacagtgttcatcaccggcatcatgaaagaaaaagtgccggagaccatcaggtgggtgttggttagttcagtgttggtggcttcaaaacgcttttggtgaaaatcttgggaggtgtaggcacggataacccgcaccccctccatatgttcgcgagtcacccggttcagatcatcagttatccgttgcatccgcatcatccgcggcatcacgatccgccaaatgatgaaaatcatgaccattagcaccaagacagcaaccccggtagcagcggtccaagtcaggttcttccccgcgatttttataatcgcccagatggtgaggatgggggctttcaccatcatctgacaccccataaccacaaacatttgtagctgagtgacatcgttagtggaacgagtgattagagaggatgcgccgaagtgttcaaagtctgcttccgggagcgaaatcgcttttgtaaacaccgattcgcgtaggttgcgagccacggtagcgccgatcatggccatgcaataaccagtaatgatggctaccaccatagaaccggcggcacatcccagcattttcgcaccttcggtcagcacctctttaacggtagcgtcgggccccacaatcatttcggtgatggtttgcatgaagtcgatcaagcgcagatctaagaaaacctggcaaacaatggtgatgattgcgagcgcgctgagcagccattctcttttcccaaggtgccgtagcacggtcatgaccccacccctatttcctggtatatagtcgcgcccaactgtttgcatcctaacgcgcgagggagttcctgtcgggtgaataccctagttttgcgccctccgcgaataagcaaatcaccccagagctaagtaaaagccaaatcaaggggcttcagcagcgaaaacaccaaaataaagacacaaaaaatgttacttagcccggcattagcccgagctttccaggtagcttggcaaataaaaaggcggtgcggggaaaactttccccgcaccgccttttgaaagtaaaagactagctagccttacttcagggtgacagaagcacccgcgccttccagctcttccttggccttttcggcatcttccttggaagcgccctccaggatggtggtgggagcggagtcaaccttttccttggcctctttcagagccagtccgggctgcagcgcgcgcagagccttgattacggcgatcttcttgtcgccggggccttcgagcactacgtcgaattcggtcttttcttcggctgcttcttcgccaccggcggcaccgggggcagcaacggcgacggcggcgggcgccgcggcctctacgtcgaagacgtcctcgaattccttaacgaactcggacagttccaacagagtcatttctttgaaagcatcaattagctcttctttgctgagcttagccatattggcattccttcctatttttgcccacgcgaggcagattttttcttgtcgatctatgcggctttactaagccgctttttcctgcttttcgcgcagggcgtccacggtgcgaaccgccttggaggcgggcgccttgaacataaaggcagcctgtaccagtttgccttgcattgcaccggccagtttggccagcgtagtttcgcgattatccagttcagcgagtttcttgacttcttcttcagacaagaaattcccgtccaggacaccgcctctaataaccaactgctcgttatccttggcgaagtcgcgcagcgctttggccgcatccacggcctctccggttacgaacgcgattgcggtcgggccggttagctcctcgtccaggaagtcaattccctggttcttggcggcaatcctagccagcgtgttcttcgtgacggaataagtagccgttcctgccaggttcttgcgcagctcagtcatctgagccacggtcaacccgcggtattcggtgagcagcagggccgatgccgagctgattttttcttccagctgagcgatcatggcttgcttgtcagctttcgccattaggccctccttccgtttatccgtgccgggggccagaacaagaaaaccccgtgcagattgcacggggcgaaaataaacctatcgatcctggtgctgccttcccaagggaagggcgtcctctttcccgaggacgcgcaaccattttcgatacgctacgcatcgttcaacctacacaggcttccgatctggaacttaaacccactggtgtgggcaccggcgatcttgggcaatagccaatttaacagcccctttgtccgccggtcaaagccgaagggcaggatatgccccttttgtgggttatttaacttcgcaggcacttagataactagatgaaagcggttcgcatgtgatcaagctcacaaatgaccgctgcggcggaggttgaagaatttattactaaacgattgcgaacgccatagttttgctcttgcgtcaagatattaatctttatatcctgctgtaacgctgggcgatgaaaatggattattcattttctacctagttgtgtagtcccaaattttttcgcgaaaaatatgtcagcaggagttccgctatgggtatgctcaaacgcaataaaaataaaatagaagcaggtcacgaaactgatttggatgttactgatctaactgccagtaaaccctacgtacctgagagtaagaaaccgaagaaagataatacccactggctatatatcggggtgattatcgcggtagtcgccgggattgctttcgggttagttgcccccgacgtagcaaaagagttcaaggtagtaggcactaccttcgtccgtctgattaccatgatgattgtgccggtcatattttgcacgatcgtgttgggtatcgggtcggtacgtgccgctgcctcggtaggtaaggctggcggaatcgccctaacttacttcatcgctatgtcaaccttcgccctagcaatcggcctgggagtaggcaatttaatcgaaccgggcagtgatttaaatattgaggccagcaaagatacggttgcccagtttacttcgggagccaagcaagagggcgagggggtcgttggctttatccagtcgattatcccggacaccttcttctcttctttaacctccgggtcagtgctgcaaactttgttcattgcgctgctggtaggtttcgccgtccaaagcttaggtaaaactggtgatggcatcctccgggcaatcgaagctattcaaaagctagttttcaaggtactttatatggtgctttggttggctccgattggtgcgtttggagccatggccggggtagtgggatctaccggcgccaaagccgtggggcagatgatgcttttgatgttggcgttctatataacctgtatcttgttcatctgcatcgtgctaggttcggtgctggcgattttcacgcgtttcaacatcttcaaacttatgaagtacctgggtaaagagtatttgctaattgtggctacctcctcctcggaatccgccctccccaacctgatgcgcaagatggaacacctggggattcacaaggccacagtagggattgtggttcctaccggttactcatttaacctggatgggaccgctatttacctgaccatgtcggctatctttatctctgacgctatgaacaagccgatgggattgggcgagcaaattggtctgttgctgttcatgatgatcgcatctaagggcgcagcgggggtttccggagctgggattgccactctggcagccggtttgcagtcgcatcgccccgaactattggacggcgtaggggtaatcgtgggtattgaccgcttcatgtccgaagcgcgtgccctgactaacttcaccgggaatgccgtcgccaccttgctcgtcgctacctggacaaaaactgttgaccggcagcgggtttccgatgtgcttaatggcaagcttccctaccatccccaagaggatgacatcgaggttgacctcatgcacccatcgatagaaatcaacaatcagctcccgcacactccgcaaccggatgtggaagcaatcgagcaactaaccctggaagaagaggaatcttcgtccagaaaggaatagggaaacctcagttacagatttgtcgccacattttaactggcgctccctaaagcagggatgctagccggtcagcgacaagtatctttcgagccctcaagttactctcacctatcgaaagtaacttgagggctcgcttgcatcttggggttagcgctggtttatacactctaaaataagtttttgcttatccccaggaagaaaccggggcttttcctgggattactcgcagcgtatcctattgacatggctcaaaacgacccgctcaacgctgaggatgcgcccccggcagccaactatccgccccaaaataatcaaaatcagcccttcccagcctcggctaatttttcagaacccacctactccagttcgaatacgcagtgtccgaatccagcaaatcaattccaccccggctctaatccgtcaccggcaactaccctcactgtcgacccggacctgcctacccccaaaaccgcgtggcgaaccaccttgacggttatttcggcgatagccatagtggggatgccctttttagtaatgactttgagaaccctgcaaggcacggttggctgggcgaccctcatcatgatgctcacggttttcccgatgttggtagtgatgaatgtagttttcctaatactcagccgcaaactgccagtaggtttcccgcaaaccaagttttggaatcccgctaatctttcggccggctactacctggcttggttttggggaaccctggggctggtcttcgtacccgatgggggcgacgagggcgagaatatgattcccctggctctaaaggcactgaatccggcaatagcttccagtgcggggatgaccatcgccagtcttttagaattcctggcgctatcagcctttatctacgccgtcgttgtcggcctattagccaaatccaaattttctgtcccggcaaatccgcagtacccgcccctacagcaagaccccaagtggggaaactattaggggcagatggcgcgaacagcagtttcgctgatttcactgaccggtagagcttgaccgggcagtgcctgagctaaccagcggtgaataccaaaccacacgtcttggcgcacgtccgggaaagataagaataggtcgtgtttaccggggtaacgttccatagttacctgccgggagagccgccaggcattagcgcacatggtttgcacacttagtaccgaatcggtaaacatcatttcccgcttgcgtttcccagtagaggacgcggtcgaagtcaggaaataggtgggtacctcggtggcctcacccgccaaaagattcttttgcgcaatcgtaatcgcacgtacccagccgaaacgcactaccgcatccggggtgcctttccaacttgaaaccagcggccacccctgaagggatggatcgcgctgccagggttccaggcgtttaggcagggtgccatcaacttttgaatcccaacccatcaaagaatctacgtaagcggagtctgctgattgcagcggcacctctttcttggctgcccgccgggagaaaatttccgcgaggacgcgggctccgaaacgctgcgaagttccccccgccatttcgatccaaggagaatcgagcagcagccccgctacctggtcagggtggcgattagcccaataggcagcagtcaggccaccggtagaatgaccggacaacacgagcggcaaaccgggatgttctgcgcgaataacctcaagtgcggcaaaaatatccaggtcataggacaggaggtcgtcggtccaaccgaacgtctgccatttgcgcagcgaacgcccgtatttagacaaatctattgcgtaaaaggcaccacccgctaaggaaatatggcgcgctaattcccgctggaagaaataatcattccaaccgtggatgaacaggcaggtaaaagtgggttcatcaggggtaccggaaattgcccaagggtcttcagcgggcaggtgacgcaccaaagtggcgcatagctctccttcttcatcgcgcggcagctccaccgtgcgcgtctgaaatcctttacctagaatatctggtacccaacgccctaccggtgccggtgtggctggtggctgcgtcggcaaagacgcggcaaatgatctcccttttcccattttctttcctctagtgaccgtgctttccctggtgggctccgctattgcgttcaatctccgcatttacttccgcaatcgcttccgccaaagtgggtccttccaggttcccaatccggaacgcttcccaaccgtcaacctggttatcgccgcctacctgtatgaatgcttcctgaacctgatcagttagctgcccgtcaccagggtcgatcatgccctcttgtttgagtagcgcttcgcaaatccgcccccgctcatctgaccacagcagcaccgcgtcttgaccgaccaacgcggaaatagaccgcagaccttcgggatctttttgcaacagttgcggagtagcgaccgactcttctgctgcaaccggggattccccggaggtctcttcactttcagcttcgccctcaccaaaagtactttctacttctgcttccggtgattcttcggaatcttccccctgactttcagcaacttcttccgcggggagcggggattcttgcccttgctccgcagctggtatctcactttctgcggatgcctcctctacatactcggaaggagtaggcggtgcgggcggggtgggagaaaccagtgaaatctcgggttcttccggggaggacgcctcttcgtcaacgtgccaagaaatctggggcgttggggcgcgatgccccccaatttgaggacgcgcatagctcatggcgttgggagtgagctcggcaacctctaaaaagcgacgaccattagacatctgccgagaagaaacttgatgaatctccagtccggaagcgaacagcactcccagcgcggaatagcaggactgatcaatttctccaactaccaggattaaccggggaccgggttgagtggtaggcggcatcgcctcgcggaactctgcccaaccggtttggaaagcttgcacgccccctgggtattgcgcagctaaatccatccagccttgtccggagacttgccccaggcgagacatcgcggccactaggctgactggatccaggcgggaaagcacttccacggacactacctggccggaggcgtctagggcggtcaaagaatgcggaccggcaccagtttcttcctctcctacggtacctgcccacgcgacggggaaaaggggtcggtcaataacctctagcacctgtgagcggatagattccagcacatctgtttccaggccatgccccaccggggtcccaaattgtgccggtattaggcgaccagattccagttcaaagagtgccatcgattcaccgttcctgtttttttaaagatctttctcctattgtgtcacggataaccccaaggtgccgttttccgcgccgctggcgattttaagcgttattttttcgctacagattctcccctagtcagcaactctgctaaatgcattccctggcgtccatccaaagtttcggcctgggtacgacaagaaaacccgtccgctaggaaaatcgcttccggattattttttaaggcaggtaggagggcgtgttctgctaccgccagcgacatctgacggtgagcagcttccatcccaaaattaccggccatcccgcagcaaccctgcagctccaccacctgagcaccggttttttccagtagggcgcgatcagcatcccagcccatcaccgaatagtggtgacagtggggctgcgccaccacgctcaccccagttaaatctggcagcggtaaatcaggacagtttgcggcaataaattcagctagcgtgaaagttgattcgctgaccatcaaagcccgcggatcggcggggaacagttccagtaggtcatcgcgaagcacggcagtacaagagggttcgatccccacgatcgggataccgttggcggccgggggcgccaggcgttctagcaatttttctaggtggtggcgtgcgccttttagttgcccggtggtaatccaggtcaggccgcaacaggtatctggcggtgctaaaaacacttgccatcccgcatcgctaagtagcttgatggcggcttttaccccgcgctgatctagtccccgagaaaaagaatccgcccagataaccacagatttgggagttgaaagcgcggcctggcgggtccgctttcccgcttgagctgcaatttctttggtcgatatcatcccaggttttctggaatagtcctgtccccagggggatatctctgattttttcggccacagctggcggttcggatactgcttttcgagggggcgagtggcaaaacgaggaagcgcgcgggaagtatccaagtgaagcagcttcagtgtcgcctggacgagcggatgaatcttggtagccagattcgctaactgcgcggctcccggtatttttgccattagttgcagccaccgaggcaaccaccccagggcataatgcgagagtggacgaagccgaccctggtaacgccggaacagggtttcactgcgccacttggccatatctaccccggcaggacagtccgcggaacaagccttgcaggccagacacaaatcgagcacctgccaaatctcggggtcggatagattgtgaatcaaccccccattggtggcttcttggaggatgcgcgccctaccgcgagtagcgtcctgttcacgtccactcgcctggaaggagggacacatgaatccgccagcaccgctgttatcggcgcggcattttcctaccccagtgcaacgatgaaaagcgtcggtgaggctaccggcgtccgcgttaaaggcaaatccttccctacgcgcgttgagggcgcgcgcctgggcgcgccgtacgttttcctctaccccgtctgggccagccgggccggtcaaaatcccgggattcatcagattcttagggtcgaatagggcttttacctgagcaaataaatccacagcctgctgggagtacattttcggcagcagctgagagcgcgcccggccatccccgtgttccccggaaatcgagcccccatattttccaaccaggtcggcggcagcgaacaagaagtctcgcgatttccctagcccggcggcgctcccgagcggcatatttagccgcacatgcacgcatccgtccccgaaatgtccgtaaagcagtccgtctaacccgaagcgatccagaagcttttgaaaatcctgcagataggcggccaaattttcgggcggtaccgccgcatcctcccaaccaggccaggcctgatccccctggggagtacgtcccccgagtccggcaccatctgcacggatcctccaaatagcagccgcatcagctcccggaggataaatcattaccgcatccccgatagccccggaggcggccgccagttcccgagcccgctgcaaggtcgcatcctcatctaggccttccccgcccacctcgcatagcagccagccgctgcctttaggtaaatccgggactgcccctgggcctttatgctggcgcaccacttccactagcctggcatccatcccttccactgccagtggctttaggggaagaatcttcggcacagcagcggcagccgcaatcatatccgggaaacctagcgccaccagcacgggagctttaggaagagggacgaggcgcacggtcgcctgagtgattacccccagagtaccctcggttccagacaagaaaggtgccagggcggagccgttttcgggtagcaggtgctccagggaataaccggaaacttggcgcccaaagcgcccaaactctctgcggatagtagccagattagctgctaccagggattttaatcccgggatttgttggatttgttcgtccggctgcggaatatcttgcggggtttctggcaagtcttgtggggtttgcccagcgataatctcgcgtcctaagccgtcgattagctgcaattctaaaacattatctgaagtgcgcccataggcggtagcgtgcgggccgcaggcattattgccaatcatcccgccaatagtgcaacgcgaggaagtagagggatcgggcccgaatcgcaagccataaggtgccgcagcctgctgcaactgggcttgcaccacccccggttctacaatcgcgtagcgtttttcgggatcaatttttatgatccgattcagatggcgagagtagtcgattatcagtccggggccgatggcatttccagcacaggaagtacccgccccccgcgcagtcaccggtatctggcattcccgtgccgctcgtagcaatacccgcaggtcatcttgatctttcgggcaggcaataactttaggaggaatccggtagttcgaagaatcggtagcgtaaacggcacggtcggcgcgggaatctaagacttccccccgaaatttttctcgcaagagagaacgaaaggtgtggtaatcacctgccccgatagccataactcacctttccttgcttttaccgttaatcttatctgttccccgcttcgcccctaaaacctattagtgtcagaattgtttatttctgacacttagggggtttgtcgctgacacttaccgcatttgcccaagtggatgtcaccgctcaactgtcagcgcacgccgctcactggccagagataaagccaaagtgagcagacacagaaaatacgcgaaaattctataggcgggcaatgcattaaaaatacccaggaactctagcgctaccaggcagtagctatagatcgctgcccagaaaacaaatattgtccagtctttgagttccttaaaagtaagactcgttttcttagctactaggtggcacagcaaaattacgaaaataaagccccagagcagcaggaaggttatgggggcgaaccactcatcggttagttcattgagttttaaggacgcggcggaagcgattcctacgaaagccacgcctgccagaccgatagctagggtaaccactgcatttaagggttttgaccttgatccgggccggcgctgccaatagcgctggttcagatagacaatcatcggagtttcaaatagatagcccaagaagttcacccatattacactcatgaacatatggtggttgatggccaaggtaactggacgcccttcccaaatccaaaatcctccgtttagcctgatcgccgccacgtccaggagaagatccattgaaaccactagccagccggctagcagagccgtcagcacccgcgataacctgatttttttcgcaagtctaagcgctgcaactgctaccccgccccacattagacccccaaagaaagggaactggttgggagcccaaccaatgctaataaaatactgtgaactgtagtgatagattccagtaagcctaactgccagcaattcgaggatgtaacctgcgagtgccgccgagaaaaacaggctcaactcatcgaagtttttctttcttagaatgtcgataaccaacaccgacgtaatcaggtaacagataatttcgaagctgttaatccaattcaccatgtccacctcctaaaacgagtctagagaaaaactcgtgcggaggtattgctctcacccatctctgccaccgctcacccgaaaagcaattaggggtattggggtgagctcgcccctacccgtggctacctaaaaagataaaagggggtcggcgggaaaatcccgccgacccccaggggtgttatgaaaatagactagggtacggctgccgagtacctctgcccgccagggcggggaaactagacgccaccactttcagaataacagctgtcagcggtaataaacgtctatttactcagcaaatagccattaagagcgcccgaccacccacttttggcaaccaggcatcacccttagtcgtcctctaggcagtggcgtcctctccggacccctgaatgttttccaaagccaccacgcgacccgcctctaggcgtgccactgctacccggaagggcgagcaagacacgtagtctaagccggccttgtggaagaagtggattgactccggatctccaccatgctcaccacaaatacccagtttaattccgggattggtggaacgaccgcgagttaccccctcgttcaccaagcgacctacgccgtgagtgtcgatggtttcaaacggggaagtcccgaacacgccctcttcgatgtactcggggaagaaaactccctcgcagtcatcgcgagagaatccccaagtggtttgggttaggtcgttagtgccgaagctgaagaagtcagcttctttcgccaaagactcggcggtgatcgctgcccgcggcaactcaatcatgcagccaatcggaatatctaaggtaactccggcagcctcgcaaacctcggcgataactttttcggcgcggtcacgaatcagaccgagttcggtaatcgaccctaccagcggaaccataatctctgggcgaggatccaatccctgcttcttcagctcagccgccgcactcactagggcgcggatctgcatctcaaataggccgggcatccaaatgcccaaacgtaccccgcgcagacccaacatcgggttggcctcatgcatcctgcgtactgccaccagcatccgttgatcgtcagggttgacctcaccttgggctttttgcaaagccaccttgacttccagaccggtcagatccggtaggaactcgtgcagcggcgggtcaatcagacgcaccgtcatcggcttgccgtccataactcgcaacatttctacgaagtcctgtttttgcagctcgcctagcttatccaaagcatcttcgcgatcggaagacccctcatcggacaaaatcgcgtgttcaaccagcgggcgacgatctcccaggaacatatgctcagtacggcacaatccgatcccggtagctttaaactccactgctagtttggcatcctgcgggttatccgcattcgcacgaacctgcaacttagcgcgttcatccgccagctttatcatccggtcaacgcaatgcaccagatctttcagatcctcatcgttatcgcaggctttcaggccggcttctaatccccactccaggtaggtggtaaccggagaatcctgaaccggaacatcgccctcgaaaacctcgccggtagcgccgtcaatcgcgatgacgtcaccttcgtggaaggttttgccatctactgtcaaagttccggcttccgcatcaatctccagggcttcggcgccacagacacaggttttgcccataccgcgagcaaccactgctgcgtgcgaagtcttgccaccgcgcgcggtcagcacgccttcggccgcaaccattcctgccaggtcatccgggttggtttcccgacgtaccaaaatacaggtcttaccagcttgtaccgcggcttcggcctgctcgttattaaatgcaatcccgccgacagcagcccccggagaagccgccataccagtagttaggcgcacccgatcagaatccacatcgaactgcgggaacatcaactgggtgagctgttcaccggttacccgctctagcatttgatcctgggtaatcagacgttcctcatttagctgcaccgcgatccggaaagcggcagccgcagtccgcttacccacgcgggtttgcagcatccacagtttgcctctttcaatggtgtactcgatatcacacatatcctggtagtgagtttccagcttgcgcataatcttgattagctcgttgtaaaccggctcattaaccgtcttgaggtgggacaacggttcggtgttgcggatacccgccaccacgtcctcaccctgagcgttcatcaggaagtcgccgtaaaccccggatttaccggtagaggggtcgcgcgtgaaagccacaccagtaccggaatcatcacccatatttccgaacaccatggtgcagatgttcaccgcggtacccagggagttcgggatccgttcccggcgacgataaatcgctgcccgctccgtattccaagaccggaaaaccgcctcgattgccatatccatctgggtacggggatcctgcgggaaatcattaccggtctgatctttgacaatctgcttgaactgcgcagttagctcctgcaggttctcggcggtcaaatccacgtcagcggttatgccaactttttctttcatctcatccagcgcgtcggcgaacaggtcgccgtcaatatccaaaacggtcttcccgaacatttgcaccaagcggcggtaagaatcccacgcgaaccgcgctgaaccagccatctttgccaagccagctaccgagcggtcattaagacccacattaaggacggtttccatcattcccggcatcgagaacttagcacccgaacgcaccgagactagcagcggctcctcctcgtccccgaggctacgccctatctggtcttcaacctcgcgcagcgcctgggttacttctggcaccagactttccggaacctcattgtgcttaagatatgcccggcaagcatcggtggtgatcgtaaagccggggggaacgggcaaacccagattagtcatttctgccaggttggcacccttgccaccaagcaggtctttcatatctttgttgccctcggcgaacatgtagacatactttgccataggtaaatggcctccatttatttttgactgcgctaaaaagcgattctttcgcttttaatcttaccaggtaaaagtgaaagcctaggtcttgagtcccctaagtcgaagcgccacaagattttttgatttcctcactgaggacgaagacgtgttttttctatctttcctctatctacctgccaatattctcgagtaaatcgccgtttaagcagccggatggtcaggttggctttcctaatcgcttacactggtgattgtgtcagtgtatccacccaggaggcagcgcctacattcgcgcgccagccgtgcgcggcggcgctcggattggaatttacttattcgcgcttcctcgctagcaatcgcgctgactataacctttattttgattctttcggcgatgcctagatctcccgaagccacagcgaaagtaactcaaaccgcccccaccctgcattggacagcggttccgcacgcgaatagtacggacagcaaaaaaaataccggacaaatagctttggaggttaccggggatcttccggggggagaaacttctaccgaagttccccaatccgcttcgggagaaacttcggtagtacccggcacctggcctgggcgtggtaccggtaaggtctacctttatcgggttgagatagaaaacggccttccgcttaaaggagagactgccgcgaagagcatccacgcgatcctaaatgatccgcgcggatggggtggaaaacagggcgaaatgtcttttacccgcaccgatgggcaggctgattttcggatagttattgccagcccttcccttacagacagactatgcgcccccctaaccactaagggggtttctaactgtcgaaatggcgataacgtggtgctcaatgctcaccgctggataggcggtgccgggatgtggttccaaaaaggtaaaaccatgactgactaccgcatttacgaagtttctcacgaaactgggcactggttaggacacggacacctgttttgtcctcagcccgggaatctagctccagtgatgcagcagcaaagctcagatgggggcgacaacctcgggtgtattcctaacggctgggcgaatccctaactccgcttacgccagccgatttttaggaagctttcagccctgcttcaggactacgtgaaagaatctttttatgagtattcttctgacatttggttttctcctatgtgcagccggcctagtgttcctggttgcccggagcgtgggggctttgaatgcgcgcgaccgcgcccgcaaagcccactttgaacaagagatcggcagcgtagaaaacttattggcgtcctcgcaggctgaccgcgataagttgcgtcagatgcgagactccggacgcctgcaacgctgggacgcgattagggacgtgatgagggaagaggacgtacccgaagaagtggccaccgagtttatcgaccgcctctaagcgatacgatcaaccaaggtgtcggcaaacttttctagcgctgccttaacctcttgatcttccagagaagcaatcgccgccttcgcttcctcgcaccaggaaaacgctaactgccgggtgcgttccaataccgaatgtgcccgtagcatttgcactactcgttctaaagccgcgtcctcgctaatcaaggttcctcggctgagttctgccagaatcttttgcccatcttcatcgagaacgccctgcgccgcatcctgccgcagcagcagaatcggcatggtatctacgccctcccgcaaatccgttcccggagttttcccagagtctgcgctgtcagaggacaaatcaatcacatcgtcagccagctggaaggctactccaatcttttccccaaactgcactaccgcctgggtaacctcctcgggtgcaccagaaagttccgccccaaagcgcgccgactgcgccaccagcgaaccggtcttatcggccagcacctggatatagaactgaaccggatcttgcccctgttccggcccgaaggtttcattgagctggccgcgacacaaccgatcgaaagttaccgcatgctgcaaaactgcttctggacccaaggtggcaaccacttgcgaggcacgcgcgaagactaaatcccctgccagtaccgcgcggttattaccccatacacgctggactgcgtttacgccccgcctagtgggcgccgagtccataacgtcatcgtgataaagcgttgccaggtgggtcagttcaaccactacgcaggagcgcagcacctcctctgaaaaaggatgtggccccaggttggagcacagcagcaccaaaccgggacgcatcctcttgccaccagctttcgccaggtgaccgataatatcgtcaagcactccgcgatcatccgataacaccgaatccagacggttctctacctgaactaggccctcggaaatccgatcttcgagctcatcgaggcgctgctgggacaagttactcacgggataacaatagcggtgttttgcaaaatatctagcaccgatcccgggaaaatccccagaagcactgttaagagggcacaaatcccaatcgccacataggtgatctcagcgtgcggagccaccgtagtattttctgccactggatctaggaacatgatcttacccagccggaaatagtagaaggcggtaatcgcggaggcaatcaccgcgcaaataaccagggcagttgcccctccttgcagacctgcgctaaaggcgaggaatttacccataaatccagctgtcagggggatacccgcaaatgagagcaagaacagcatcatgcatccggccagtaccggatgagttttaccgaaacctgcccaggccggcatggaatgctgttcagcagtagccaccccgtcctcgttagttacccgcaccaggtaaataatcgcaaatgccccgatggtagccaccgcgtaagacagcaggtagaacagcactgcaccattagcgttaagtgcgcccttggtgaaggcaatcaaaatgaaaccggcatgcgcaatagacgagtaggccaacattcgtttgatgttgtcttgcaccagaccaaagaaggtacccactgccatcgtcaaaatagccaccgtccacaggaacggcttaaagttcgcttcgaactgcacgactaccgtagagaagaaacgcagcatggctaggaatgccgcagcttttactcccgcagccatgaagccagtcaccggggtaggtgccccttgataaacatccggcgtccaggcgtggaagggagccgcaccaatcttaaagagcagacccaccatcatcaaggcagccccggtcatcaaaagcgccggagaagctacccggtagggaatcgccaacgccagctgatctagcaatagcgacccggaatagccatacaacaaagaaatacccatcagcataaagccggatgcaaacgccccaagtacgaagtatttgagggcggcctcttggctcagcaggcgacggtaacgcgccatagcggtcattgcgtataggggtagcgagataatctctagcgccacaaacagggtcagcatcgagttcgccatggggaacagcatcatcccacccagggagaataggctcagcggcaagacctcgctacgctgatagccgcgccgctcagtttgttcttcctggaaggatccgggaatatccgagggctgccccgcaaaagcagaaacctgactgccggtgcgatctatcatcggcaatagtgctagcagtcccacgattagcatcagcatctgtgagaacatcgagaatccatcaacgatgagttccccgcgcactagccgctgaccgctttgcagatcgaaagctccgaaagagggggcaaaggccaagagtgcgaccgcaactacaccgatcgaccaggcacattgcacgctccagcgacgcttagcagatacgaatgcctcgagcagaattccgatgactgccccaaagagcaccaccattaccggcgccattagcgcccagttgaaacctagttcactgaagtcgttgattacggtagcgttggttaagctcactttccgctcccttctacttgaaaagccacatcctgggtgacaaccacctgttgggctacttgcgacatgggttcaaccagcggttgcggatgcaagccaatcaccagcatcagcacaatcaaaggcgctgccaccccccagcgttcccgcggattcaaatcactaatcgatttgcgatgttcgggagccttgccggtgaaaatcttttgatagggcaagagtacgtaaaccgcacccgcgactactcccaccaagcaaagcaccgctgcccactggtagagccggaaggttccgattagcaccatcagttccggtacgaacccggatagaccaggaagggcgatggccgccaaacctgagattaggaaggtaccggcaatcagcggggtaacccgttgcataccaccgtaggcagcgatttcttggctttgaccgcgctcggtaaggaacccgccaatcaggaacatgcccgcgattgacagcccgtgcgcaaccatataaaccatggcaccggccaaagccaccgtattgccaacatagatacccatcaccatcaggccaaagtgcgcaaccgaagtgaaagagattagacgcatcagatccttttgcgccaaagccgccagcgaaccccagattaccgaaatcactgccagaataatgaacgctaaagcggcgcgccgagaggcatccgggaagatggttaagcacagggtaataatcccgaaagtaccaatcttgtccaagattcccaccaggagggcggaagttcccggacgggcattttcagcggtatcggctaaccaggtatgaaccggaaccatcggtgctttcaccgcaaacgcgatgaagaagctaatcatcagcgccatttctaccccggggctagctttgagctgtcccgccaagttttccagcaggaagaggctagcgtgtttttcactggccgcagcggcattgggcgaatagacgtaaaccccgacaataccgatcagcatcactaatccacctgccaaagaatagagcaggaacttcatagcggcagcttttcgtttcgcaccattcccgtaacgtccaatcaggaagtacataggaaccagcatggcttcaaacgccaggtagaagacgaatacgtcgcgagctgcaaaaatcagcatcataaatgccagagtggctaaagtcagccccacatatccggcatcatcatagggtttttgctcgccctcgaggtcgcgtgccgaagcgatcagcacgatcaaagtgagcagcgccgaaagcactagcatcgcgagccctaagccgtttacccctagcgcccaagaaactcccagggcgcgaatccagctatgggtttccgcgaactgataagcggcggctttaccatagtcaaagttcagcgccaggtagatggtgcctaacaacaccaaggccgatactgctagtccgatttggcgcgctgcaatccgggtaggtttaatcagccacagtgccagcgccgccaacgccggtagcgccaccaacagcgttagtaccgggaaagttgagttcaggactgtaatttccatttatcttttcctcctgccctaaaccaattggcttccgacaactaggactaaggctaaaagcaccccgccaagaatgtaactggcgtatgcacggatgtagccgttttgcacatgactgaccgcacgtccgaatgccccagcacaccaggcgataccgcggacaataccgtcaagtactccccgatcagcgccacccaccccgatggtgagcagctgtgcaggtagcatggccaccgactcgttaacggtgtcttggtaaaggtcaacccgagctgcctccaccagggcgttagaggccggagccactttcggtaccggccggcgaacgtacatggtgaacgccagagccaggccacaaagcaccaagaccaaggtgataaccgaaatcgcagtatgcgacaacactgagaccgtggccttttcggtagcagattgcgttccagtcactggctctagccattggttgaacttgtccgtaaagcccaacatcatccccatagccaccgaaaatactgacagcaccacgattggcccgttcattagccaagaagcctcatgcggatgcacatcgctgccaccatcgaactgggtggtccagcgcttttccccatggaaaatcgtgaagaacagccgcgacatatagaacgaggttatgccagcgccaatcatggccactagaccaaagatccatgcgcctgcggttccaaaagctgtcgcgttaaacgcagccgcgataatcggttctttggagaagaatcccgagaacgggggaatccccaagatcgcgagccaggcaatcccgaaacaaatccaggaaactttcattacctgatttagggcaccgaagcggcggatattaacctgctcgttcatagcgtgcatgaccgagccggcacccaggaacaactgggctttgaagaaaccgtgtacgaacagatggaaaatagccaacgtccagccgatgggtcccagacccgcacccaacatcatgtatccaatctgagacatagttgaggcggcaagtactttcttcatatcgtccttggcacaacccacaatcgctccgaacatcagggtgatagccccgacgatagctacacatagttgcgccgtcggggaggccacgaagatagccccagaacggacaatcaagtagacaccggcggtaaccatggtggccgcgtggatcaaagccgacaccggagtagggccggccatcgcgtcacccagccaggcttgcagcgggaactgtgcggatttaccacaggccgccaacagcaagaacagaccgatggcagtggcccaacctggggtcatgtctccggagcgggaagctcccagtacgtccacaaacttcatagaattgaattccgcgtacatggacatcatcgctagcagtaatcccaggtcgcctacgcggttcatcacgaaggctttcttggcggctaccgcattgggtagttcgtggttccagaaaccaatcaacaggtaggatgccaaaccgacgccctcccaaccgaagaacaacgccacgtaggaatccgagagcaccaaggtgagcatcgatgccacgaagaagttcaggtaggcgaagaaacgtcgccgatcagggtcgtgttccatataggccacggagtaaacgtggatcagggaacctacgaaggtaaccagcagcacgaaagtcatcgacaggggatccagcaggatattccaggaaagtgtgatctgctcgttaccgctaccagccgtaaaccagctaaacacgggagccaagatcgatctttctgctggtgcctgcccgatcatttggcagaaaataaccaagccaatcaggaaggaactccaggaggcagcaactgccagccaatgcccccatttgtcggttgcgcgtccacataccaacagcagtcccgacaccaccaggggtatcgccaccatcagccaggcatattccgccaatcccacagcggacacatttgccatttgctgctgatcagcgcttagcaagaatgaattcattttctgtaccccctagcgtcccatcaggcgcacttcgtcgaccgaggtcgaacgacgcgtcctaaatatcgaaacgatgatcgctaggcctaccaccacttctgcggcggctaccaccatgacgaagaaagccatcacttgcccctcaatgttttggtgcatatttgagaaagtcaccagcattaggttgcaggaattcagcatcagctctacccccatcagggcgattaccgccgaatgccgggtcaacacgattaccgcgccgatgaagaagagaatggctgccaatacaagatatgaagtcaaagacattattcactgacctccgtttctgtggcatctgagttgggtgctaccggggaatcgctgggtggcgctccctcgatcttgggcgtgattacccgagtcttaggcgtctgcaaaccgctaggcgcgtcctcgccggacatcccccaggctccggatttagccacggcttgggaggccgccgttgagtgcacgccgtgggatgcgttcccacctttatcggcgcgaatcttctctaccaggtgcggcgctacttcgccgagtgtacgatcagcgtttcgggcgcgtagagcagcggaaaccgaagcggtaatcgtccgctgatcctcaccggagatattgggggcatcagccgcgttagtagtctggtagacacccgcgattggctgctgaccaggatggattccccgcttagcgtagtcttccattcgcgcctgcgccgtttccggctgcttaaacaacttgtggagacgatcgccgtgagttagggacaccccggcgactaccgcaataatcagcaggcagccgatgacttccatagtgtaaatatgttcggtgaacaggctcatcgcgatcttaaccgggttagaatcggtgctaccttgggcagctgcggtcggcatatccggaacttccccgaacttgggcagataggctttaaccagcatcaccgcaatcaagagcgctccaaaaccaccggcacaaaaggcgccccagcggaggaagcgacgggtgcgtaggtagttatcggaggcggcgacccccaccatcatgatgatgaacaggattagggtcatgaccgcaccggtgtataccactacctgcacaaccccaataaagtaggctccttgcgaggcgtacatcattgctaggaagagcattacccccaccatgcaaaccgcagagtgaactgcggtccggcaaaatagtacgcccaacgccagcgccaccatacataccgcagccacccagaaaaatacggtttgtcccgtactaaaatctgtggctgccgctgtggcttgggctagcaatatcattgctgaacctccttaacctccgactgcctgacagtcgggtcatctggacggtgttcgcggacccaatcgcgttgcgctggggtcaccccggtcacctttcctcggtagtagtcaacatcggcggttccctccaccataggatgcggcgccgccagcatcccgtcctcgagaggagcgagaatctgatctttttcgtagatcatggtttcgcggtggtagtcggccatttcaaaatcgttgctcatagtcagcgcgcgagtaggacacgcctccatgcacaatccgcagaaaatacagcgcaaataattgatttggtagacgcggccgtagcgttcccccggagaatactgcgcctcgggagtattcgcggcggcctctacataaatggcgtctgccggacaagcccaggcacacaattcacatccgatgcatttttctaggccgtccggatagtgattgagctggtggcgtccatggaaacgcggctgcacatggggtgcctcataggggtattgctcggtaaccgtaggacggaagaacgaacggaaagtgaccccgaaaccggcaaccggagcgaagaactcgcctaccggtccttttttatccggctcaaaactcatatcttccctggtgggattgcgtttactcatctgattccccttctttggctaccaggtggtcttccccggcacccgcccgcactaccgcgcgcggactgggaggtaatacttgtcccggcatgggtggcaccggatatccgtctttgaacgcgtcaaagggctcgctgagggcagcttctttttcggcctgcctgactttttccttcagatccgctttgcctccggttatccagataataatcagggcgaccacaaacactgctgcaatcgcgatcattctttgtgaaatggagccaatgccgtagacactgactactcgcatgactaccacgatcaccatccaggcaatcgaaaccggcaacaacactttccagcccagcatcatcaactggtcatagcggacacgcagcagggtgccgcgtacccaaatcatgaaccacatgactgcccaaactttgatgccgaaccaaaggaacggccacagcccactgttaagcgcgcctccgagaatggcgtcgccacccgggaagcgccagcctcccaggaacagggttacgcagataccggatacgttaaacatattgatgtattccgccaggtagaaccaggcgaacttcatcgaagagtactcggtcatatgaccggccacgatctcgccttcacattcaggcaggtcgaagggcaaacggttaacttcgcccatcatcgagattacgtagattacgaaagccgggaagagggcgacgcaccaccacataggactttgcgccgccacaatctcggaggttttcatcgatccagatactacgaacacggataccagggacatgcccatcgccagttcgtagctgatcacttgggcggcggatcgggtcgcgccataaagcggcagatgcccattagatgcccagcccccgaggataatgccataaacgcccatgcccgcgaccgccagcatatagagcaccgccacattggagtcggtcagctgcaagggggttgagaaactgccaatatgcagatccggtccgaaaggaatcaccgcgtaaatgcagaaggcacaggcggcagtgataatcggtgccatcaggtaaagcaccttatctacgtgccgtttaaaaatatcctctttggttagaagtttcacggcgtcagccagcgcctggaacaatcccagcgggccgtggacgttcggtcctggtcgggtctgaatccgccccaggccgcgccgctctacccatagggccataatcacgctgataatcagccatgccacgatgaataccgccttaattagggttatccaccaggtgtcattgctgaaatcagcggcgccagtactatttgcgcttagcaggattgcggtattcactgctgcacctccgcattgggctccaactggactaaggcgccactggtgacgcccaaagattcatgcacatgagagtgggttgaacattcgggaacccaaaccacgcgctgtggcatatcggttagcaccacgggaagctggatgcttcccttgtttgttttcaggtttacagcgccaccggcactgataccaaactcttccgccgtttccgggctgatgcgggcgaaagaggcacgcccggatgcttgcatatcgggggcgcccacctgcaagagtccctcatcaatcagggtcttgtggcagctaagcaccacttggtcacttccgggagctagcagttctgccggagtagccggctcgaactccaggcgcttgccatcccaatcaagcagctcattagcttccgcatacagcgactttagagaatcaatccccagttcgcagcccattacctcggctagtttatttagcacttcccaatctggcatatcttgagaaaccaagacctgcccaaagggacgtaagcgaccttcccagttaataaaggtgccgggtttttcagaaaccggcgccaccgggaataccacatcggctgcctgggcagcgggtgtcaggttgacctcgagagagattacgaacgaggccgcatctagggctttttctgctaggtcttgatcagccaggtcacgcaggtctaggcctccgagcaccagcgcagatagctccccggagcaggcagcttccaatatttgcctggtatcgcgtccgggcgcatctgggagcttcgcatcccaagcggctgcaagatcgctgcgagcttccgcatcgcgtgcgtcccgcccgaagggtagcagccccggcaataaaccggcttctactcccccgcgttcgccggagcggcggggaatccacgccaggtgagctccgctgcgagcagccaaatcgtttactgcgcttagcagacccggtatcgtaccggcacgttcgccgactacgattactgcgccctcgccttttagaccatcaaaaacagctccaaagtccccttcggcatcggcctttacattcgcgactacttccggttcggtacccggcgccgccgccaacacggttgccgcagtcttgagggaggagggggaagtgaagggagccaccgtggccacctttacgcttccagaacgtacccctttgcgtagccgcaggaacaccgcgccgcattcgtcctcgggctcaaagcccaccaaaaggacttgaccagctttttcaaggtctgaataggttaccggcattccggcacctgcgaaataggcacctaggaaagtttcttcttcgcgcccggctgcgcgagtgcgctgatctatatcgttgcttccgcaaactacccgggcgaacttggaccaagtgtaggcgtcctcaaaagttaacctgccaccaggcaagaagcctactttgcctttcccggcggccgccagtcccttagcagcgcgatcaaacgcatccgaccaggaggtaggcaccaatttgccgtcctcgcgcactagcggagtttttatccgcgaaggttggaactgccactggtaaccgaagcgatccttatcggtaatccactcgtcatttacctctagatctttttgcgccatccgccgggtaactaccccccgacgaatatcggtgcgcagagcagaaccggaggcatcctgttcggtaactccgcgggtagagaccaaatcgaaggggcgcgcccggaaacggtaacgcttcgaggttagcgctcccaccgggcaaatctgaatgatattgcccgagaagtaagagctaaacagcctgcctgcctggtctttttcgtctacaccggcgcctatggccgccggagaagaaagcggggcgggtttgccgtgggaatcggaaagcgccggagcatcaggattgaggcgaagagtcggcttggatccatcagaatcggatattcccaatatttcctggtcaaaagcaccgatgttctcgcccatgaaatcgtggtcgtcacggggagaagatccgccgccgcgtccctgcaaggcgatgaaggaatcgccggcaacctggttggcaaaacgcacacaacgctgacaaagcacgcagcgttcccggtcaatcaaaatctggctagttagctccaccggcttgggccacaaccgcttttcatcagtaaagcgagtatggagggtgccgtggctcatggcttgattttgcagcgggcattccccgcccttatcgcagataggacaatccaaggggtggttaatcagcaaaaactcggtaataccatgttgggctttttccgctacctcggaagtcgcggcagtttttatttccatccccgccatcgcggtcatcgtgcaggctggctggggcttaggcataggacgaactacgccgtcacgccccggcatcgctacctccaccagacactggcggcaagcacctgccggatctagcagcggatggtcacagaatcggggaatatgaatccccagtttctcggctgcgcggattaacagggtacccttggcaacctcgatatcctggccgtcaatattgatttggacttgctcactcacagggcgcctccttcgttaaaaacctccgaggcggcgggcgggaaggcctcccaccagggagtggtgtacccggcctcgaactcttcgcggaacttttcaattccgctgcgcaccggggtagccgccgcgtcaccgagagcgcagaagctgcgtccggcgatgtttccggcaatatcgcaaagcaaatctacatcgccctcttgacctttaccggcctctaagcggtgcattatctgtttcatccaataggttccctcgcgacaaggggtgcatttaccgcaagattcatgctggtagaagtcgatccaacggctaatcacccgcactacggaggtcgtttcatcgaatacctgtagggcgcgggtggccagcatagagccggcggccgctacatcctcgtaagttaaggggacatccagttcagcttcggtaaatagcggagttgaggatccgccgggggtatagaacttcagggtgtgcccctcgcgaatcccaccggaatactccagcagttccctcatggtaatcccgaaaggtgcttcatagagaccggggtgtttaacgtgaccagacaggttaaacatcccgtaacctagggatttttctttacccatcgaggcataccattccgcggaattgcggaacaccgtggatacttgggcaatggtttcggcgttattgattacggtgggacgggcatagagccccttgaccgccgggaaaggtggtttcaggcggggatggccccgtttaccttccaaagaatctagcagcgcggtttcttcaccgcagatataggcaccggctccggcgtgggcaatcagtttcagatcgcccagcaacccggcgtcctcagcctctttaatagctactaacagccggttgtaggcgtgaactacttcgccgcggatatagataaaagcatgatcgcaaccgatggccaagcaggtgatcgccaccccttcgataaccgcgtggggattagccaaaatcatcgggatatctttgcaggtacccggctcggattcatcgcagttaacggtcaaataacgcgggccaccatcagcgggtggcaggaaagaccatttcagcccggtaccgaaaccggcaccgccgcgtccgcgcactcccgcttgcttgactgcatccagaatctgcgctgcttccatctgcttggctttttctagccccgcgtaaccgccagttttctggtaggcctttagcgtccagctttcgggttcccgatactgtttagtgacaatcggggtcagcggaacccggcggatctcagacttctcgttttcgctcacttgtctgtctccttgtgatcagcagaggagtgctccttacctaccggatctttcccggcatgattagcatctgcacccgaagctgtttcatcggcctgggcggcctcagatttttcaaactgctgcgggtcaggggcttccatacctttttcttcggccacttttagtccccacaaactggcgggaccagcagctaccccttggttggcagtctcggggttggggaatccggccaaaattcggctggcttccttaaaggtaggagccgcatcagatccccgagtgggatgtaccggtttaccagccttgatatcgcgtactaactgcacagcagattcgggagtctggttatcgaagaactcccagttgaccatgactaccggcgcatagtcgcagccagcgttacattccagcgcctctaaagtgatcttgccatcagcggtggtttcgtcatttcccacctcgagctctttttctagggtttccatgatggtatctccaccgaggacggcacacagggcgttagtgcaaactcccacggtatattcgccgttggggtggcgtttgaactgggtgtagaaggtggcaaccgcgctaacttcggcacgctgacagttaagaatgtcggcgattagtccaatcccgttagcagtcacgtacccgtctatgctctgcaccaagtgcagcagcgggatcatggcgctgcgttcgtgcccctcggggtagcgagcaattatttccgctgcttctgcacggaatttttgctcgacctctggatcgtaaaaactcattagcgatcaacacctcccaggacgggatccacactggccagcgccacgatcagatctgagatcgtgccaccctgcgccagtagggataaggattgcaggttagcgaagctggggtcacggaagtgcgcccgataggggcgagtaccaccatcggagactacgtgtacccccataatgcctttggcgtgttcgaccagttgtgtggcttggccgaccggcgccctaaagccttcggttaccagcttgaagtgctggattagggattccatggattcacccatgatttctttgatgtgttcaggggagttcccttgaccatcggtacctacactcagctgagccggccacttaatctgcggatcagagatcattaccggctcgccttcggtttcatctaggcgatctagtacctggtagataatcttcatggattcgtagcactcatcgaagcgaaccaccgtacggttgtaggcatcggattgatcggtgactggaacattgaaatcaaagttttcatagccgcagtagggctgcatcttccgcatatctaggggatatcctgcggctctaactgacggaccggtcatagacatcgccatatgggcagatagaggcaaaacagccacgtcacaaaaacgtgccttaaagatcgggttctgcaaggtgagatcttgcagctcgttaatatcgcggcgaatcttgggtaactgatcccgaatatattcggtacacccgggcggcaaatcttgcgctactccgccgggacggatgtaagcgtggttcatccgcaaaccggttatttgttcgaatacccttaggatttcttcgcgccctctaaacccgatggtcatcatggtggtggcgcccatttcgttaccaccggtggcaatcgccaccacatgcgaggttatccgatttagctccatcattaggatgcgaatcaggtttgcccgctctggaatttcagcggttttcttcaggactttttctactgccaggcaataggcaacttcctggaagaagggggctacatagtccatgcgagtgcagtaggtaacgccctgtgtccaggtgcgatactccatgttcttttcgatgccggtatgcaagtatccggtgcccactcgcacgtcgcggacatattctccgtcaagttcggcgattaggcgcagcaccccgtgggtggaggggtgaactggcccgatattcatcacgatgcgctcgttcgccagcttttcgacttcggaagccatttcttcccagtcgccaccatgcaaatcatattgcggggtgtcctcggtaatcagattgtcgagggcggggccggcagccctgatcaaggggctgctatcggtgtcaggtgtgtatttcatttagctgtatgacctccgcgaatcggcgggcgggactgtcgcgcccttaaattgcaccggaataccgcccagcggatagtctttccgctgcgggtgccctacccagtcatcgggtaaagcagttctggtcagaccgggatgaccggtaaagataatgcccatcaaatcccaggtttcccgctcccaccagtcgtttcctgggtaggtagccactattgaaggaatccgaggatcggactctgggcaggtgacttctaggcgcagctggcggttgtgagttgccgacaagagcatatagacggcgtgtaactcgcgacctttatcatgcggatagtgcacgccgttgaccccgatgcaaagctcaaagcgtagatcttggtcatcacgtagccagcgagccacctggggcagatgctcacgggcaatgaaaatggttagctcatcgttgtcaaccactacccgctcgattacctgtgctacttccaggtcggcgttttgaatcagttcttccaggatgtccacgacttcgtcaaaccaggatccgtaagggcgggggctttcaccgggcatctgccgctcaatctggatctccgtaaagccggtggtgtcaccatcatcatgtaccccgaacagaccgtgacgggtaccgaaatcagagccggcagtaaaaccgcgcggggcggttacctctactgctactggcccgtcctcgacatcggaatggaggactaccgtcttgtcgtcttcgctcacgccaacagtcctttcatctgggaggtaggagtcgcttccaaagcagctttctcggctttacgggcgatctctaaccgctgtttttgagtaatgggggtgcggtaatggatttgatcccacaacaccataatcgcgtggattagggcttctggccgcgggggacatccgggcagatatacatctaccggaaccacgtggtcgcagccttgcaccaccgcatagttattgaataccccgccagaggaagcgcacgcacccatggaaataacccacttgggatcgggcatagagtcgtaggcgttacgaataatcggtgccatcttccaggaaacccgcccggatacgatcatcaggtctgcatgccgcggagaagcgcggaagacttccatcccgaagcgggaaatatcgaaacgcggggtgccggtggccatcatctcgatggcgcagcaggccagccccatggtcaccggccagacactagctttacggttaagccccataaacttgtctaggctggtgagggcgactcctgccggcagctcattatcaaaagacatgctgtacctctctcttaatagtccagtccgccgcggcgccactcataaacatagggcaccagcactaacacgatgaacagtaggatgtcgatcaataccggaatagccatcacctgcccgaagtgaccgatcgaaaccgcaaacggatacaggaacaccatttccacatcgaaaacgatgaacgtcatcgcgattaggtagtacttaatcgggaaacgtccgcgcgcgtcctcgtgaacattgggggcaatcccacattcataagtagccagcttggtgcggttcttacgacccgggctgagagctgcggacatcgccagaccgcctacggccagcacaatcgcgaccgcgcccatgattaacagtgatgccgatggactcatttggcctccacatccttcttgtctgccccgccatcactggcgcagcaactgctgtagtttccggttttcttccggctcagttgttctttctgaccgatgttcctcatgacggtattaccaccttagtcagaatttgtagcactctgtcggaggctactcctttacggcgttcataaccatcagaaagcattttatgaacaaaacgcatcaaggcgggtttgtccaacccgtacttggtgcaggcgtgcataatcttggggttttcaatcaaccgcacgaaaacgcgacccagactgtagtatccaccgtactgatcctgcaggtcacggggatattcacggagggcgagttcggcttgcgcgcgcgaggtgcgccccatagcctgtactaaagcagcagcggcgcgcctgcccgcgaacattgccggggcaatcccctcgccgttaaagggcgaaaccattccggcggcgtcaccgaccaaaagtagcccattttcgtaagccggtttgcggttaaatgccatcggtaggggggcagagcgcagggagccaagcatattttcttcgcacaatccccattctgccggcagattcgctacccagcggtggaatatttctttatagggcagcttggtggattgggctcccgaagaaaccgatcctagccccacgtttacaatcccctctcccatcgggaacagccagccgtaaccagggagtagatttgatttgccgggcttgccatcccacagttccaagtgagattccatcatggtttcgtcaccgcggggggaacgaaaataggctcgagccgccactgccattggccgattttttaaaggagtgcgtccttgccgcgaagccaaacgggcgttagctccggtgcagtccactacgtattgggcatggaaactaagctcgcgcttctgccgggtttctaggtcacgctgaatcgcgctcactccccgggcgtaaccgccatcatcggtgagcaagtcctgaaccacggtattttccgccaggcgggcaccggccgacacagcctgctggattaaacgctgatcaagctttgtgcgctgacaggtaagtccataggagggcagggagccgactttcggccacggcaaagcgatccgatgccccccgccgattacgctcaacccgtaattgggctgccaaccttctgccaaggggttgattcccattgccaagatttcttttaccgctccgggagttaaaccgtcaccgcagattttgtcgcgaggaaaggttcccttttcaagtacgaggacgtcaacgccagatttggccaggtgataagcggtagcagcgcccgcaggaccgccacccacaaccagcacttgacagtgcttgtctgcaagctgatccgccatgcctggacgcccctcccttgctagttgccagttcttgccgcagccgttgccgcagcaagtaaaaacgaggatttttagacactctcctcgcgcctgtctcaggctaacttgcttttattgtttgtctaaagtcacagcggtttctgctggctaggcgaataccccgggacttaagtccatcttaatcgtttgacgtttaagcaagggttttcttacttaattctaagcagctttcaggaaagcactgctatctcctggctgcagcgaccagctatcgcggtcttttacgcctaaacgtcctctttaaaggcacggtgaatagccactgttcccaaggtgagattgcgataggaaacctcgccccagccattcttttgaattaggtaacccaaagtttcttggtctggccaatccaaaatggaatcgaacaggtaggtgtaggcatccgaatccgaagacactaggcgaccggcagtgggcaacacgttacgcatataaagctggtagagccgggcaatcagaggggagggcggggtggaaaactccataatcgccaacttgccccccggcttggttacccgcgcaaactcacgcagtgcctttgcgggatcatgcatatttctaaatccgaaagagcaggtaacagtatcaaaagactgatcggcgaagggcaaatcgtgggcgtcaccgaccacgaagtttaattcactatgacgcttttgcccctccgcaaccatccccggcgagaaatcacagcaggtaaccgcggctccggcgcggtaaaaaccgagcgaggaagtaccggtacccgcggcaatatcaagaatctcttgcccgggacggggagctaccacttgctgcagacagcgccgccaaatccggtgctgtccgaaagtcatcacatcattagtcaggtcgtaacgggatgccacctggtcaaacattccagaaacttcttctggttgcttatctaaccccgcggctgccggcggatttttttcgctcaaaatggctccttctaagtaggcacctgccaggttactcagaaacgcttgcccaatccaaccaggttaaagccgcgccgcctcgccttagctttttgcagggtcttgctaattcgagagcgacgccgaaaatctatcaccggccatcctcgctgtaaggcgcgcacccgcaaccaaatatccggattgatagccgaaggtttacccaccagggttagcagcggcatatcgttatcggaatccgaataggcaaagcaggaagcaaggtcatagccgcgctcggcagccagcgctatcaccgcgtcacgtttgccctgggagtgcataagttccgaagctaaacgcgcctcgtatatcccatcttttaccgcgatttccgtgccaatacccccggttattcccaagcgctgtgccaacatttgcggaagctccgagggcgcggcggaaatcaaccaaatatcgtgtcccgctgccaggtgtcgtttgattaacccttgcgcctgcggaaacagtttcttctctaagagatcgcacacttcctgggaaatcgccataatctcgtggcgggaatgccccgccattacctgcaaagcccggttctttacctggtccacgcgctcttgatcttctcctagaaccacatagaggaaggcttggcgcgcagcgaagaataaatcgcggatcccaaaaaatccgtgacgaaaaagttcacgagtgagcacccaggagctggctccccgaattacggtttcgtcaagatcgaagaaggctgctaccttcggattcacgctcacatctctagcctagtggtctaggcgcagttttcgcacaccggttagtaaaaaccgtttgctagggtggagaccatgcagaatctaacaactattcacctgatgcgtcacggggaagtcgataatccagatggaattttatacggccgcctccccggatatcacctaaccgacctcggcaggcaaatggcgcagatgagcgcggaatacctcctggaaaaaggcgcctacttagatgccattatttcttctcccctggagcgcgcggtagagtctgcaactccggcctccgagctattcgagctacccatccaaaccgataagcgtcttttagagtccatgaatatgttcgagggcgaagtggttaatggtaaccgggcggctctgctacacccgcgcaattggccgcgctaccgcaatgttttccgtccttcctggtgtgagccttatgcagtccaggccagtcgggttaccgaggcagtgcgttcggctttacatctgccgattgccgatccttcccgcctgggacgctccgctgatggctctccgattcgcgaaattttgctggtttctcaccagctgccgatctggtctttccggttatttgtggaaggtcgcccgctggcgcatattcctacccggcggcaatgcgctctagcttccctcacgtcccttactttcttgggcaataccctgattagtttggattattgtgaaccggcagcgccgctcctagctcaggcctccgatatggtgccggggacttcggcggccgccttaaatcaagggcactagggggcagctagctggaaactccaggagtttcctctcgacaattgccttatcagagcggttattcaaaccgcggcaactagaacgctttattcctgagaggaaggtttttccggagggtttgcgtccggatttgtttcgccctcgccagtgtcctcagcggagttgttctggtcttcaccagcggtttcttctccgctagccgcatttttctgctgcttttccgctcgttttctggcttcttcctcggcctcacgcgccatccgctcccgccgcatctttgcctctaaagaaaacaagaaatcgggattatcgtcgggagcctgcggtatctctggttcctgcggctgcgaacgttccccgctccctcggaaaatctctagggggttgcggggaatctctacccgaccgtcggggctttcggctttactcgcccaggaaatcactatccaggctagggggccgaataccggcaatatgataatgatcaacagccaaaaagcgcggggcaggcgtccgggtaaatcggatttttccgtgcgcaagcaatccactagcgcatataccgctagcagaatctgtacgagggcaataactaccgcagccatgcttctaccctagcaactatcgattttttggcctgcctataaaccctgcaaagcccactgtacggcgacggcgagaccataccccaaggtgatttgccccacctgtttcaaggtttttatcaggtctttaccgcgggctccctgcaatactttcatcatcggaaagctcaccccaaccgccatagccagcccaaacaccaatgcttcccaacgaacactaaaggaaagcacccccagcactaaggccgcatataggtagcaggcaaacaagtaacgcgagcccttatcccctaacttcaccgctagcgtatttttgccgctctggcgatcccctggaatatcgcgcagattattaaccagcaacagcgcacatgaaagcagcccgataccgctggcagctacccaggtgcgccaaggcagcgtatgggcttgtacccaaatggtgccttgcactgccaataggccgaaaaaggcaaacaccatcacctcggctacccccggcagataaccgtaggggtgcttacctccggtatagaaccaggccgccagggctgccagcacccctaaaccaatcagggcgtaggtacctgcccaaacacaaagggcgattccgcagattcccgcgagcgcatagcagctaagcgccgccgctagcaccgtgcgaggtgccgccaaacctgctcctgtcaggcgctgggggcctacccgctttcctttagcgtcggtgccccgaatcccgtcggaatagtcgttagagaaattcacgcctacctggaggaatagggctactagcagcgccaatgctgactttcctgctgaggcttgtcccaggccgatcgcccctccgattcccataatcaccggcgccaaggaggcgggtaaagttttcggacgagcggcttcaatccactgcgatccagttgccattacagcaccagcccctttctttctatgtacgccttggctgctatatttttcgtttgcaaacttttgccggcagtcctatttttggcgctaccttagcgaacccaggcttctccagctgctacccgccgcgccgccaagtctcgacaggctgctctatcaagattaccttgcaggtcagttgggattttatctaccaataccagggcgcggggggcatgtgcccgatccagttgcccggttaccagggaacgcaccaacatcgccaaatctgtcgatggctcagattcatcttcagtaggaacggtggcgctgtgcgggcgctctcccccatcgggccgctggaatcccgccggaagttcagctgccgcaatttccatttgctctaaatccccgtccagatcctcgggtaaagaaaccggctgcagcggcgcggcatccggggcggggaagacgatttccccctcatcggtggggctggcggttccgcgcgccacttcatagattcccgcaggtagttccccggtttctgcggcagcaaccacatctaccttggctcccctgatctttgcggccattgccgccatcgcggcttctaagggcgttagcttgggtccttcatcttcggtttccgcaggcagcccggcgagtttccgtacccgctccggatcaactttcactggttttaactggggaaatagtggtttatcttcggttttgacctccagattgtgccggggattcaacagctcctcggcaacatcgggtgccggtttgatgactgcagtaaccagggatccccatttaggatcgggcactcccaccactactacctgttctacttgtggaagatcccggataactcgctctaccagggaggcctgaatccgcactccggcagtggaaatcacatcgcgtaaccgcccatcaattaccagccgggggccgcgcatatgaccggcgtctttagtacgcaaccagtgcctacgccctcgagaaacaaactctacttctcccggctctcccaaatagccggtcatcatgcagattccggacagccaaatccgatccccgatagtggccacatgcacgcccgcgaccggtttaccgtccagtacgcatagaccgcaggattcgggaatcccgtagccttgcacgatattgattcctgcttgctgcgcggtacgcgccaggtgatcgcggctggtcaagccggtaactatcagcttggaaaccgcgcccagctctgtgcgtttagcgggagtaatctccagtaactcggccagttgcgctttagaaatctgcagataaataggggcttcatcttttgcggagcgatcttgcgccctttgaattgcccgaattatctcgagggcgctggcgggctgggtcttggcggcgattatcggagggatattgaccgcaatcgcccgcgccaagaccatgatgccatcaatctcagtgactggagaggtgagaatccagcgtcccggtctgccgactgccgagttcaccgcttccgccatacctttgatagtcagttgcgagtagcagattaccgcgccagctgctggagccggcagtgctaaagcggcggattcgggtacctcccggcggagagtttcatactctaaaagttccttgggaaagccgctggctttagggaaaggaaaaagaatctgtttgcctcttagacgcgggttgcgaagattctgcggtaaatcttctgagcttcccatatattttgccagcgtcgaaagcaacgtagagacatccgccgaggaatcaccgatcggcaggtaatgaaaaggagaaaggatttccattgcgacttcctaaaagtaaagtagtgtcgaaagctattctagcctgtcattggctgagagttcttaaagcaacgtaaccaaaaatatcgctaaaaccgcagtaagtgacaaaatgttacctgcaacacataagtaagattaggtttcttccattttttaggtataataaagggagccggtagctccggctattttaggggaacgtgtgtcaagataacccctaaacgataacctagagccggtttcgcaaaagcgcaggagggagcgcgcgaagccggctctaggcatataaaaatctgtttcccggttttacctgcggttttcttcctgacatagtgcgggttaatgcccgtttgagtgttaaccctcaatttagaggtggaagacttgtccgccttgtaggatgggttggcagtgcaacctcgcagaccaaggatgacctggtctctcgggtttcacggcgctaaagctggagggcgatatggattcgaaacttttgcaaggcttagagacaagacttcaccaggcttttcaatcacaaaatttacaaaagattaaccagattgtttctgcagcacctgcccgcgaaataaaggtgttgatggaaagatcaaacttccatcaacgtgcattgctatttaggactcttcccaagaccaccgctatagccgtttttgatttgctggaccctgccgtccaagccgacctggtcagtgcgctacgcggtgatcatatatctgccgttgtagaagctatggatccgcatgaccgggcagaattgcttgacgaattgccagcgtctgttgccacaaagattttggctggcctcagccccaccgaacgcgaccttaccggcattgtactggggtatccagaaaaatccgtcggacgaagaatgagcccaaaattcgctaccgtccaccccacagatagcgttgaaaaggctctagcctacctgacaaaagtgcttgataacgtagaaactatctacacggtgcccgtaacctcagccgaaaagaaacttgtaggcgtagtaagccttagagacatcatgggcgccgataaaactaccctcatcaaggacttgatgaaacatggagatagcgttaacgccactcaaccagcagaatatgcggctcggatgtgcgcagatcgacaccgactcgccttacctgtcgtcgatcaagagaaacggctgctcggcattctgccattaagtgacgccctcgacatcctcgaatatgccaacaacgaggatcaagcacgcatctccggcgcagaaccgcttcgcagaccttacctagccaccccaataggcgactttgttaaggccagagtggtgtggcttttagtgctagctatcggagcaaccctaactattcacgtcctagaaacattcgaatccactatcgcccaaatggttgtgctgtcagttttcgtgcccctgctcatcggcaccggcggcaacaccggaaatcaagcggccaccactgtcacccgcgccatcgcgttgagtgacataaagatgggcgacgggctcagagtgatctctagagaaatccgagtcggagcactattaggcaccctcatcggaacactcggatttgcgctaaccagcattttttatggcccacaaataggtgcagtcatcgggctaaccctgctgtctatctgcacactagctgccacggtcggcggcttcatgcctctagtggcacgcaagttcggcatcgacccagcagtcttcgccaaccccttcatctcaacgctgctagacgcatcaggtctagtcatctatttcttgatcgcaaaagcagttctaggactataggagtccatttcttctttgggaaccatatttccgccgacaccccaaccaagatggatagcgttatctataccaaagacctgcatccccattcgggtgttaacccgttatccccggactctgaaaactttagtccagtaaaatctctgctacttgggttaatacttgggaagcgccgcccgacacccgcacgtctgcgagggaatcagcggcagtgggtccccggttaatcaccgctactttggctccggttccccaggcttcccgcaaaacccatagccccgtcagcaccgccagggaagtgcctactgccagcactacgtccgcttcccgcgcagccgcgaaagaacgatccatggcctcacctggcaatgcttccccgaaaaagacgattcccggtttgataatcccgccgcaacgcggacaagaaagcaggttgaactggcaggcacgcgccgtccgttcatcggctgccgccaaaactgccacattcttagggtcggggtcgtcttttacgtccggattgagtttgcgtaactcctggtcaatatgttcgcgcgaaaatactgctccgcaccccaaacattgaacttcctcgaaagtaccgtgcagcagctgcacattcttacagcctgccttgcggtctaggccgtctacgttttgggtggcgatgcagttaatcagccccgcttcctctagccgggctaaagcgtagtgccccggggtaggctgcagccgcgccacggttttccaggtttcttgattgcgccgccacacccatttttgccaataaagctctcctaggaactgatccatatcgacggtgggcatcccggaagaaccggtgccgcgataatccggaatccccgcatcggtggacatgccggcgcccgcgaccacgatcgtctttttcctggccatcaaatccgctatagcctgggctcccgccctgtcttcaccaataaactcgctcacgttttgcctcccgtcctcagactacctcgtttagaggacgattatcgtggacgcaaccagcattaacggggcgtgcgttatataaccccaaaaatttcctggttaacctggtaagttttagctattctcgataggagtaacctatttaccgcctatccccgctacaattggggaaggcaattttagatgccgtctgcaagaaaggaagggcaccaccgtgaggccagtacatattctcatcctgctcctggtgttgatcattgtttttggggcctcgaagctgcccgacattgcccgcaatatcggtaaatctgcgaaagttttgaagtctgagttatctgacctcagcgaagatgacaccaataagcaggtagcggcaggaacccaaaatccccaactccccgccaccccggcctcacctgcgccgtcccagaccagcgggcaagatccatctggccaagtcgctagcgggcagtccgataccgctgacccgcctggaaataaatagccgctgcagcccctatgccgggacaaaaaaagactaacccgcaagctcgaatgcgggtgactgaacatctgctggaactgcgcaaacgtttgctgctggcgctggcaggtattttcgtagccgcgatcgccggctggttcttagttactcctaccttaaattggatgcaagcaccgctgcaggcggttagtgggcaggctccacaattaaacttccagacgattggcgccgcctttgatatgcggatccaagtgtccctgtggttaggggtgctgatttccgcgccctggtggattttccagatcggggcgtttatcgctccgggtttaaagcgcaaagaaaaaatctatatcgtcagttttggtttagtcggaatcttgctgttcagcggaggcgccctctccggaatgtgggttatccccaaggcagtttcgattctgaactctttcaccccagacggatccgtaatgctgctgcgggcggattcctatatcaccttcttcatgcgcctggtgctggcgtttgggctgtcgtgcctggcgcccgaaatcttagtggcactcaactttgcgggagtaatgaaagctaaaaccatgttgaaaggctggcgttgggcagtagtgattgccgctgttttttcggctgtcgccaatcccctccccaccgcctggccgatgattctacaaatgtcggtgctaattggactttacctgctggcggtagggatctccgctatcaacgactggatcagaggcggcggtagcctgcggggtctcttcggcaagatttggcgaaaacggaaacattccgaagcttcttccgctcctgagtaatcataatttcttgatatccgcacgtatttcccttacctaggccctcggaaaacaaagccctagcccaggctatcttccctgatatcgttaggatttgagacataaaaagcaaacccgaatcacttgcagcaatcgaaaggggaatctgatggctggccacaacaagaaggatgatccggaaaagatggcacagatgcatcgctggttaaaagcagtgcgagcggaactacaactagcggaggatcccctaaaagcggtggaatcagagttactgtcgctgattggaacggtggcgcatggaccctcccgtccgggagccccgctaactgcgtttcttgccggttatgtctgtggcgaaggcgctgatgcgcaagaaactattgctcagctgcagaaattagcgaaagaccagcaatactagaaagcttgcaaaccgcgaatagcgataggagggataatgggcgcagaatccgggggaataaaacctccgcgtcagctacttgaccgctggggtcgggttgctaaagacctgcgcatatcggttactgatcgctgtaatttgcgctgcagctattgcctacccgaggacgccgacacctggattccccgccaggatctactaactccccgcgagtttgggcgtcttgcgcaagtggcgctgtcactagggattcgcaaggttcgcttaaccgggggcgaaccccttttacgccccgatttagaggaaattatccgcaagattcgccaggcattcattgaggctgatttgcctgccgagattgccctgactaccaacgctattggtttagctacccggatagattccctggtagaggcaggtttagggagaatcaatatttctttagatactttagatcccgaccgttattttgcgcttgctaagcgtgaccgattttctgaggtcgcagcggctttagaaaaactgccaggtagcggccttgaccccgtaaaacttaactcggtgattctggatcaaaaatctttagaggaattaccagatctggtgcgctttgcgctgcgacgcggtttccagtggcgggctatcgaatttatgcccattggccccctgggcggttcggcggctgtacgtcctcatgccagcgatattttccggcgcctgcaggaatgtttcactctcacctcgattgaaaccgatccggccgctcccgcgcgccgctggaacgtggcagctggcagtgattatcccgccggcattatcggggttattgcctcggagtcagctcccttctgtgccagctgtgaccgtacgcgcctctctgccaatggcagagtctattcctgtctgttctccctatcctttgtggatttgctagctcctttgcgccaaggtgcctccaatgaagaacttgctcagctttggctgagcgcgcaagcagctaaacccgctggtcacaccgaaataacggcggaacgcagaacctattctctttctcagattggaggctaaagcgtggtaactgtacgttttttcgctggcgctgcccaggcagccggagttgacagtgcgcgggtggcagcagatgctaaccagactctgcgagaaatcgcccaagccgccagcaacaatgacctggcaccaatcctggaggttagttctttcctagtcgatggtgccctcgccgatggcgacactcccctcggcgaatccgccactaacggccaactggatgtcctcccgccctttgcaggtggttagaagcagcacccgaatgtgcgcgggaaataagttttttctcccgcccaacgaatcgaaaaatgaccaagtcattttttgattcttacgcccgcctagcctgatcggataaaacttcttccccgcgcaatgcttacggctatcaaatacccgcaggacggatggacctaaagcattttttccattaggggtagataccgttcccacgcggaattttcttcttttggttgtatttccgcactgaaatgtggttcccagttttccccgggaacttcgccagcaacgattgcggcctgacgggcggctcctttggcaacatattcgccgggttcgggcagacgtagcggaatctgcaagatgtcggcaagtatctgcgctaaaaccgttgattttgctgctccccctatcagcatcgctttgttcaccgtgaccccgccagcccgcacagattcaagcgctgcgcgcatgtggcaagctataccttcgaaagcaagcctggcgaaattctctttagtcatcgcttggggagtcatgccgaaaatgctggcggtagcctcgggaagattcggggtgcgttccccggcaaaatagggcaataatgtcattcccccgcaacaggtttcacccttggcagcgagctcatcaagttcggcgtaactaatccctaaaatccgacaaaagtagtcttgtatttgcgaaccgttaatagtacacgcgagtggtaaccactttccggtggcatccatgaaacaggtaactccgcttttcgaatcacgaagaggatggctagaaactgccgccaccactccggatgttcctaaggaaagcgaggcctctccctcctgaaggtttagccccaaagccgcaccggcgttatccccacatccgggccccaaaatacccccaccaaactctgcgctggcgttacctactttttcgtagggttccgcaatgcgcggcaagattatttttcgcgcttgttcttctgatattcgcagcgcatgagccaaaatgtcatagcggtaggatccgtcctcacaatccacatatcccgttcccgaggcatctgaacgatcagtaactagttcacgcaaatcattagatccgcgaattctccaggtcaaccaatcatggggcaaacagattgctgcaatccggtttaagttttctttttcatgatcagctatccaacgcagttttgaaacggtaagcgaagcaactggcacggaaccaactgcctgagcccagaaattggcacctttttctttaattagagcctctgcgctttctgctgatttcgtgtcattccaaagttgcgccggccgaattacttttcctgcttcatcaagtagcaccatgccatgctgttgtcctccaaccgcgagcgcagtgacgtcattgagaccacccacctgggtagcggctgcacgaaacgcctccagccaagagctgggagctacttcagttccttccggatggggcattttcccttgtcggacaattttcccagtttctacttcgattaccagaactttacaagattgagttgaggaatctatcccagctactaaagtcatttttctcctacagggtatggagcgtgagtattcgcccttctttgggctagaccactccgccaacaattactttgttttagtctcaaacatagtctattgagctataaaagattggtcaaggttatttttgcaggaaatatacgtgatataactcactttgataattattttatttctgtgctagcctttgttttgttacacaacaaacagtcgatctctggtttgggtgaaaaagacactcttaccgatgggctcgtacgaggaggtacatttatgtcagatctatggaaaacggatgctattccctttgttgggaacgatgatccacgacaaggactaggattccacttttatcaaccagacaaagttgtcgcagggaagaaaatgtcggaatggctacgcttcggggtcgcctattggcacagcttccaacagcggttggtggatccctttggcgagggaaccgcgcaacgcccctacgactctcttactgaccccctggagctggcgttagccaaagttgattattccttcgagttttatcaaaaactgggtgttgaatacttctgcttccatgaccgcgacatcgctcccgaaggcgacaccttacgggaaactaatcaaaacctggacaaagtagttgaccggattgaaaaacgtcagcaagaaaccggaataaaacttctttggaacacttgcaatttgttcactaatccgcggttccaagccggggcagctacttccccctttgcagatgtattcgcctactcgggcgcccagcttaaacacagtttagaaattgcaaaacgtttgggagcagaaaactacgtgttctggggtgggcgtgaaggctacgaaaacctgtggaacacagatctaaagcgcgaacaagaccatatggccagcttcttccatgccgctgtggattacgcgaaagagataggtcttgactctcaattcctgattgaaccgaaaccgaaagagcccaccactcaccagtacgatttcgatgccgccaccagcattgcgttcctcaagacctacggcttggacgacagcttcaaacttaacttagagggcaaccacgctaaccttgcagggcatagctatcagcacgaagtccgagttgcgcgttctgccgggatgctcggctctctggatgccaaccaaggggacaaactattaggttgggatctggatgaattcccctccgacctgtacgaaaccactgcagtaatgtgggaagtactttccgaaggaagcatcggtcctcgcggcggtctcaacttcgatgcgaaaccgcggcgtagctcttacaccgaggaagatctattcgcagcacatatcgtggggatggactcctatgcggctggcctactggttgccgccaagctaaaagaggatggcttcatcgatgaaatcctacaaaaacgctattcctcctttgaccagggaataggcaagaagattgaggacggtcagtttactttggccgatttggaggagtattccctagacaagacgcaatctgaactgatgaatgctaacgaacctggggaactagaaaccatcaaggctactttgaacaattacttggtaaaagctctcgctgacgcctagttattaactgacatctagtcacgccggttgggttcagacaaaatgtctgaacccaaccccactctcaataaccgagttcccaaaaggaacttactaaaatagctctacaagctgcaatgatgcggcaaataatcggtgataaaaatgcgaaaaaataaaatttctatgactttcgtgtacctgttcggttccctaggaggactactcttcggatatgataccggcgttatttcaggtgcaattctatttattcaagaccagctccaccttgatgcctggggtcaaggttgggtagttagctccgtcttactaggggcagtagtgggggccgccgtaatcggtcccctatctgaccgctatgggagacgccgcctcatcctcctggcttccataattttcttcgttggtgccattggatccggcatcgcatccggggttgcggtgctgattatttcccgtctaatcctcggtttgggagtcggaaccgcctccgctctaattcccacctacctatcggaaatgtcgccagtttccaagcgcggtttcataaccggtttgttccaactgatggtgatgaccgggattctgctggcatacattaccaactacgcttttgctggtttctacaccggttggcgttggatgctcggtatcgcagcgcttccctcggccattttgttcattggggcattgatcctacctgaaagtcctcgctacttagttaaagtaggtcgccctgaagttgcaaggcgctatttgaacgctatgtataaaggcgacgaaaccgaagtcgagacaaaaattaaggaaattcagcaccaggttgatatggaagaaggtacctggagcgaactgtttggcaagactgcccgtccagccctggtagcagccattggcttggcgattttccaacagataatgggctgtaataccgtactttattacgcccccactatcttcactgatgtcgggtttggggtttcggcggcgttaattgcacatatcggaatcggcgttttcaacgtgatagtgaccgtaatcggaatttggttaatggacaagattgaccgcaagaaaatgcttattggaggagctgtcggtatggcgatttctctattagtaatgagcatcggcatgcatttttccagccaatcgcataccgcagcgtatatttgcgcgatcgcgttaactatttacatcgcctttttctcagcaacttggggaccggtcatgtgggtaatgattggggaaatgttccccctaaatatccgcggtatcggaaactccttcggagcggtcattaactggggtgccaactccgtggtgtcgctaaccttccccttcctcctcaacttctttgggaccggtagcttgttcttcggatacgcggcggcttgtgtactggcaatttggtttgtacacagcaaggttttcgaaacccgcaatcgctccctggaggagattgaagatggtctacgcaagggcaacctgaaataagagtcgcataaaacaaaataaaattttatcaatcgccaccgaactggcagaataaatatagctgtgaagcaaagtattgccagttcggtggcatttttcctatgctctatttcaaggagtgataaatgagacctgggaaaaacgctcaaacaatcagaaaagaaaatctgcttcttattctggaaaatgttttgggggcagacagattcgtatcgcgagcgcaggtcgcacaaaggacaggattaactcgagccacggtctctcgcctagtagatgagttaattggtttagccattcttactgaactcgatccggttcgcaccacaatcgggagaccatctgcaccactggttgctaaaagtggcactttttgcgttgtaggtattgaagttgctttgcaatatatttcggtagtggttacagatttgtctggcgcggaactctataaagtttcacaaccgattaacgctcgattatctgatccaaaagtaatactaggtcgctgtgtgcagatgctagaagagtggaaagcacccacagaagttcatattgcttcaataataatggctatcccgggtctagtttcagacgctaaacatcgaattgtaaccgcgccaaacttgggctggattgacattgaaattacagatttctttacctcccacaaatatgctgctaccccactaacagtggtaaatgaagcggatgcttccgcgtattcagtgctgtataaaaatcctggtcaaattggcgatacctccgatttcctgtatttatcggctggtgtaggggtaggtgcggcattgatatatgaaggtcgtttatttagtggacagcacgggtgggcaggagaaatcggtcatatatgcgtagataccagtggcccaaagtgcagttgcggttccaatggatgcctagaacaatacgccggattagacgcgatgcttactcgcgcgaatctccccttggatgagtcggtagatcccctaatcgagcagatgataaagggaaacactcaagctcgaaagactgttgatttatgcgcgaaatccctgggaaccactatcgctaacgtactaaatcttttagatctaaacactgtggtcatgggtggtcacttcgcccagctctttgactatatggaagtgatcctcatgtcggagctgaaataccgattactatcctccaggtggtccagcataaccgtaaaaccgggacagcatggaactttcaccgccgcgcagggagcttgcctgatgggatttgagcgtttccttaaccatccggaactctgggttaaaccgtaaaagctgcgctaacagtgtcagcgagcaggtatgcgcggggagaagtttttcctcccgcccaaagaatcgaaaaatgaccaagtcattttccgattcttacgcccgcctagcctggtcggataaaacttctcccccacgctagggttgcaagctccgcttggccatggagcgcctgatatttcgggcagctcccccacgcgagcggtgctttcggttaccgaaaagggagaaatgcacttagcgtgcaggagcggatcgctaccgagggataaaaaataaagaagaaccaaaagcatcgaacaccaaacaacgcgccgatttgcagccatttcttttttccgacactggtcaacctgtccttgcacaagggtcacggctagggaaggatcaaagatcagtagcgggggaggagattttcccgagtaggcgcggtgggcataagaattcggaaactttagcacccgggcggatttatgcctcagggtaggcctcgggcactaaatccgtgaaaatgccagagcattttccggatttcggggcgggaggcaaaatccgcctgggtgcgcacaagaggcagattttaacctgcggggattttagggacagtttgaccagtggttacttccattggagaagtattgatccttccaaatcggcacctgcgccttaatctggtcaacgatctcggcgctcactttgaaggcggcggcgcggtggggtgcgtccaccactactagcagggcagtttctccgatttctaggcgcccgatccggtggcgtacgaaaaccgcatccaaactttcaacgctagtgccagcagcctccggggaaaccgcgccctcgccctcggaaaggacatggtcaatcgcatcccggacggctttaaccagaaatttttcagcctccggatgcgcggaataaatcaggtgggtcacttcttgaccgccgtcgtggttgcggacgcagccgttaaagaccacccgcgcgccggaagtggcgggaatatccgctatccccggagacgaactaggatctaccaggggtttttctgtaatttttacgtccaatagcatctgtcaccctcctgaagcgctctcccggtagagtataaagcagtagttaggggaaaggacgcggatggtttccgaacgtgatcgcctcaccgccactgtagacgggataggtgagtgcgggattgactctttgcaggccgcgcgggttttggtagtaggcgcagggggcctaggttccccggcgttagcgtatttaagtgctgccggggtcggcaccctgggcatttcggatcccgaccgggtcgagcaatcgaacctgcagcggcaagttattcatcccgcttctagcttggggcaggttaaatcggtgtcggcggcggccaccgtccatagcttgaacccgaatgtacgggtgcaactggaaccgaagataacgcccgacaatgcccgcagcattattagcgcgtatgacctggtgattgatgcgaccgataatttttccgctaaatatctgcttgccgatacttgcgccgaggtgggccgcccgcatctgtggggaactttagtggccatgaacttccagatttcggtgttcgccaagggacttaccctgcgggatctgtatccggtggcacctccggaaggaaccacccctacttctaaggtaaatggcgtgttaggggcagtttgcgggcaagctggctccattttggcaactgaagctatcaagatgattgtgggagtgggcgaacctcttatcggaaaattattgatcgtcgataccgccagcgggaaatggaacgtagtacattttgagagcgccaaggcgaacaaagctaccccagaaaggataggcaatcatgaaacccgtagatgaatacctaaaccaggtattaatgcaggtaaagtcgcttcctcctacgctaatgccggtggcggaggctttgggagccactttggcagaggacgtgtttgcccgttttccggtgccgccctttactaactcggctatggacgggtttgcggtgcgcgcctgcgacctgccggacgtcctcgaaaataataaaattcccccttcttgcgaagacggacagcatgccgaggaagatccgtcgaaaccagtcagtaaaaataacttgccaagcgcgccaggggatgacggggcacaaaaaactttacccctcactttaccagtggaagccgatattcccgctggtgataacacggattatcaactcagccctgggcacgccatccgaatcatgactggtgcacgcatgcctgccggcgccgataccgtgattaaagtcgaggacactaccctgccggctggcccgcttgccctacccaaagaggtcacgatcgtgcagtgcccccgcgcaggggcgaatgtgcgcaaggcgggcgaggacgctgccatcggtgatttagtgctggaagcgggaacgatacttactcccgctgcgctttcctcggcagtttcgattggttattccgagttgccggtttatcgccgcccgcgagtggcggttatttctaccgggttggagctgcgtccggtgggagcgagcctgaagggagcgcagatcccggactcgaattcggtgctgctggaggcgttgttgcgtcggcaagacgcgatcgtatctggggtttatagctctgatgatgagccggaagtgtttgcgaaaaccttgcaacaggccgctcagggtgcggatttgattgttactactggcggagtgagtgctggcgcctatgacgtggtcaaagaggtcggcttgtcgggaggattagagtttacaaaagtggcgatgcagccgggtaaaccacaaggtttcggcacgattccggctcccgatggagccgcagtttatgtggcaactttgccgggtaacccggtgagtgtattcgtatcttttcatgtgtttgtgcgcccaattctggcggctctcgcaggtaaggaaggacgcgctgcgctgcaaactcgcgccgccaccactacggtggcctggaagtcgcctgctggtaaacgccagttcgttccggttcatttaactgaggcgcagcgcgtgggcgatacccctaccattacccctactcaccgcttaggggcgcgttctcatttcgtggcttcgctacatcaagcaaatgcgctggcgatcgtgccagaggaggtaacccaggtagatcaatggagcctagtggatgtgttgccctgttagggatgcattgatccctgcaatatcgcggtgcgggaatttaggaaataaggaggagtaatgaaagacgcggaagcccagcctttacctcacttaaatgcagcaggtcaggcgcatatggtggatattaccggcaagcaccccacggtgcgccaggcgcgggcacgcgccttcgtgcagtgctcgccaaagattatggcagcgctgcgctctggcgaagttcctaagggggatgctttagcggtggcacgtatcggcggcatcgccgcagcgaaacgtaccccgctgctactgcccttagcgcaccctatcggggtacattattgtgcggtcgatatcgaactagcggaagaaggcgtggaaatcaccgccatttgccgaaccactgatcgcaccggaattgagatggaggcacttaccgccgcctcggttgcggctctaaacctaatcgacatggtgaaaggggtggacaaaatggtttccatccgcgaatgctacgtccttgaaaaacggggagggcgctccggcacctgggtacgacccggatgcgaacaagccgccgcagttaaggaaaataaccatggctagctcctcgcagtatctaaatggggtgattatgctcgccggaggcaccggtaagaggctgggcgggtgcagcaaacccgatttactaatcgccggagatcgcctcatcagctggagtttatccttcctgccgaaagttcccaccgtggtggtggctcctggcgaggttgaagttccagagaatgtttttctcaccatggaggaacctcccagctccggccctgccgccggtattgttgctggttggcgcaggttagcgaactctttcgtattttcgccctccgatattatcggggtgtgtccggtggacgctccgctttccgggtttgctttgcgtcagctggcgcggcagctacaggaaaccaatgaggacgctgctgagaaacaaaaaatacttttaggccaggtgggggaagttacccaatatgttctcggggcgtttaccgtgcgggcgctaatggagatggcgcgagcaaataccttaaatcgttcggtacgcggagtgctggctgaaatcgggtttgccacccgcgagatctctccggactatgcccgcgacgtggatacgccggcagatatcgccccggtaaccgagttgctacgtatctcccgctagctaggcgaggacaccgggttaggtcgagcgagggagtagattgcccctcctgcccaagaattcggaaaacgtagcggcgttttccaaattcttatgcccaccgcgcccgctcggaacaacctactcccccgcaagggtcgcggccggtaaaagatacgagaggggcttgagccgagccttgcgaggctcacggggtccccggagtgcttttaccgagccagacccttgatcaataggcgggaggaaaaacttctccccgcgcccctgggggcgtggctaactatctattccagggggaaggcggccggatctagctgctccaaaaggtggggcaagagcgggccgaggacgctaatggtgtcgcgtactcctcctcgggagccgggcgcattggccacgatggcaccgtttgcgccacgcgcagtgattcccactagggcgcgcgaaagcgaagccagcggggtggcttttagaccctgctgacagatttgccaagcaatcgcgtccaggcgtgcctctaacagcggagcggtggcctcgggtgtcaggtcgcgttcggtaattccggtgcctccggtagtgagcaccactcgcgcgccctcggcaatggcagcacgaatttcgttttgcacggattcgattccgtcagccaccacccttactcgatctacgtcgattccgtactcacccaacagttcctgcgctaagggcccggatttatcagggcgttctccgcttttacaacgatcggaaacagttatcaccgcacctgcggcacgaccacgtaatttttgtagttttttctcttttaagtgtgcgtgcgggtctactgacacggcgatttcctcctagtaattatgtaagtcaagacttttctttacctggttatttcccataaaaactgattactatttgcagcaataatactgccctaacctgcaggtatcctcaaaagttatcctaacacgaataattgaggaacaatctgcaagactggcaatgttacctggtattactgaaagcattggagctatggaagctacaaagaagtctaaatacatactgactgactgggaaccgaataacccggataaatggaactctggtcttgcctggcgcaccctggcgatttccacctattccttaatcctggcatttactgtttggttcctggtatcagcaattgccccgaaacttaacgagatcggattcgaccttactaaggcgcaactgtactggctaacctctatgcctggtttgtcctgcggattcttgcgtttgatttacaccttcttgccgcccatcgtgggcacccgaaaactggtgggctggtcctccatcctgtacatcgtccccatgctgggctggttcttcgcggtacaaaatccgaacaccccctattggtggctactagctttagccttcatgtgcggaatcgggggcggttccttctctggctatatgccttctaccggctatttcttccctaaacgcttatcggggaccgctttggggctgcaagctgggattggcaacctggggatgtcgattattcagctagtcggcccgatgctaatgggattctcgctgtttgggctcacctggatgaccccccagcagaccgctgacggggctagtatctgggtgtctaacgctgcgattatcttcgttccctggtgcatcgtagctgccatcttgtcatttaccatgctgcgtgacgtgccgattaccgctaatatccgccaacagctcgatatcttcagcaatcccaacacctggtatatgacggtgctgtatgtgatgaccttcggactattttcgggtctctcggcagtattcggactgctcattaacgacaactacggtgcggagtccaccttgaaactggcagtcgcaggagcctccttcgccttcctcgggccgctgatcggttcggtcgtccggatggcctgggggccgttctgcgacaaaatgggcggggcaatctggaccttcatttccggagtgggcatggcggttaccctagccatcgcgggcttctacctaaataatcctcgcggtatgagcgacttttacggtttcttgattgcgatgttggtgatgttcttcttcgctggcctaggcaatgccggcaccttcaaacagatgccgatgattatgcccgcccgccaagcaggtggcgcaatcggattcaccgccgcggtagcctctttcggccccttcgtggtgtcggtggcgctaactatgatttcgccgacggtcttcttctatggatgcaccgtcttttgcattattggctcggcgctttgctggtggcagtacgcccgcaagaacgcgcccttccccggataagaattattgccgaggacgccgctagcgtcctcgggacaaaaacttaataagcacacaacttaaaggaaaataaaatggctgtttcttcgttattaaaactaggtgcgaagcttaggcgcgggcaggtaagccaggacgctcgccaaatgttcctggtcggagggcgggaagccgatgcgttctatcggcaacgtttcagccatgacaaggtggtgcgctctactcacggcgtgaactgcaccggttcttgctcctggcgggtgtttgtaaaggacgggttaatcacctgggaggcacaggcggttgactatccgtctaccggtccggatatgcccgactacgagccgcgcggctgcccgcgaggcgccgcgttctcctggtacgagtattcccccacccgcatccggcactcctatgtgcgctcagtactgctagatgcttaccgcaaagctaaacaaactcacccggatccggtcgaggctttccgggcggtagccgcagatccggtagcctccgccgcctataaatccgcgcgcggcaagggcggtatggtgcgtaccagctgggaggaagccctagagatcgtggctgccgccaacgtggccaccatcaaagactatggtccagaccgcatcgccggattctcggtgctcccggctatgtcgatggtttctttcggggcgggcgcccgctacctgcagctgattggtggggtcaacctatctttctatgactggtatgccgatcttccagtcgctagcccccaagtgtttggggatcaaaccgacgttcccgaggctggagactggtttaactcttcctacctgctggtttggggttcgaatctgccactgactcgtactccggatgcgcacttcatgacggaagcgcgttaccacggtcaaaagatggtgtcgattaatcctgactattccgataacaccaagtttgcggatgaatggctccgggttaatcccggcactgacgcggcactggcgaccgcgatgggacatgtgattctaaatgagttccacgtgggcaaacagtctcagtatttcctggactatatgcgggcatataccgactcgcccttcctgataaagctagaagaaaccgcggaaggattggtgcccggaaaattcctaagcgccgctgacgtttctagcctacctgcagaaactaaagcaaaaccgaaaccagaattccgcttcttagtgatggatgccgacggcagtgtcaaggatccgggtggtactttggctgaccggttcactccggaaggtaaaggccattggaacctgaagatggagggcgtcaatgccgagctcagcctgtatgaaagcgatgctaaaaccgcagaaatcactcttccgcgtttcgacctggtagccggagaaagcgcaggctcctcggtaggtgctggcaccattaagcgcggggtgccggtgcgcgaggttgacggacatctggttaccaccgtttttgacattatgctggctcactatggggtaaagcgcgccggtctaccgggcgtttggggtgaggattatcaggattcctccaacccgggtaccccggcatgggcagaagaaatcaccggagtgccggctaatgccaccatccggattgcccgcgagttcgcccaaaacgccctagattctaagggacgtagccaaattattttgggtgctggcactaaccactatttccactctgaccagatttatcgcaccatcctggcactaacttctatgtgcggtacccagggggttaacggtggcggctgggcgcactacgtggggcaagaaaaggtgcgtccgattaccggctggacgcaatattcatttgccttggactggcaacgcccggcacggcaaatgatctccaccggtttctggtatttaactactgaccagtggcgttacgattcgctaaccaccgaccgcttaacttcgcccgcgagcgtggctcaggtacccaagcaaaacattgcggattctttactggaagctaccgaacgcggctggatgcccgcatatccccagttcaaccggtcttctctggaactgggacggcaagcgcaagagtcggggaagaaacccgcggaatacgtagccgaacagctagctgccggaaagctagagttcgcggcgaaagatccggacaacccggtcaactacccgcgcgtcctctttaactggcggactaacctgttggggtcctctgctaaaggtaccgagttcttcttgcgccatatgatcggcgccgataacgatgtccaggccgaggaagtacccgaagatcagcgtcctcgtaacgttcgttggcgcgagcaggccgcgaaaggcaagctggatttggtagtgactgcggatttccgtaacacttctaccactttacattctgacgttttactgcctgctgccacctggtacgagaaatatgacctgtccagcacggatatgcatccctatgtgcataccttcaacgcggcgatcctgccgccctggcaggcacgcacggatttccagttgttccaagatctggcgcaattggtgtcgcagatggcaggcagtcacctaggcacgcaaacagatgtgttggccgctcctctggggcatgacagccccgatgaactagctaatcctgccggggtagttattccccgggaggaatgcggctgggtgccgggagtcaatatgccaaagattattccgatcgagcgcgactacaccaagattgcggagaaatttaactctttaggtccggtaatcgagaaaatggggatgggtaccaagggcgtgcctttcaccccggataaagaactacgggaaatgcgcgaacagttcggagaaatcgagaccgcgattggcccgcggccgcgcctagacaccgatcagattgctgccgagtttattttgaagttctccggtaccaccaatggacggctggctacccagggctttaagaccttaactgaaaaagtgggtgcctccggagatatgactgaaatgtctcgtgggcacgctgattaccagatcactctggccgatgtgcaacaggctcccaagacagtggttacttcccccgaatggtcaggcagtgaacacggaggacggcgctacaccgcgtttagccaaaacgtagagtaccacaagccctggcacactttgacgggtcggatgcactactacctggatcacgattggatgtgtgcctacggggaatccctgcccacctatcggcctccgctggatttgcatcacctatttggggaacccgcaccgggcatggtgcgcggggatggcacccccagtgccgaggtcgcagtccgctacctcactccccataacaagtgggcgattcactcccagtatttcgataatctctatatgctcactctcggtcgcggcggacaaaccgtgtggatgtctccgcaggatgccgccaagatcggggtacgcgataacgaatggattgaagcccacaaccgtaacggagtggttagcgcccgcgcgattgtgtcccaccggatcccggagggaaccgtatttatgtatcacgcacaagaacggattacccatactccgcttaaccagtcaaccggtaaacgtggcggtacccataactccttgacccgcatctttattaaaccaacgcacctgttgggcggatatggacagttctcgtatgccttcaactacaccggtcctaccggcaatcaacgcgatgaagtcacttatattcgccgccgcagccaggaggtggagttctaaatgtcagtggcagtttgcattttctctaaaggagcccagtcatgaaagtaatgagccaagtggtcatggtaatgaacctggacaagtgcattggttgccacacctgctcggtgacctgcaaacaggcatggactaaccgtaccggcaccgaatatatgtggttcaacaatgtggagacccgtcccggactcggttatccgcgcacctgggaagaccaggaaaagtggaagggtggctggcggcgcactgcctccggcaagttagttccgcgttctggggggaaactagcacagctggctaaaattttcgccaaccccaatatgccgcagatagatgattattacgagccctggacttacgactatgacaagttgttgtcggctccggcaggttcgaaagcgctaccggtagcgcaggcgcgttctcagatgagcggaaagcccctaaagaacatcgagtgggggccaaactgggatgacaatctggccggctctaccgaaaccatgcaggacgatcccacccttaaaaagatgaaccagaaggtaaaagcggatctcgagagttcctttatgttctacctgccgcgcatttgtaatcactgtttgaacccgacttgcgtggccgcctgcccttcgggagcgatgtataaacgtaccgaagatgggattgttctggtcgaccaggatgcttgtcgcggttggaggatgtgtgtttcgggttgcccctataagaaggtttatttcaaccacaagagcggcaaagccgaaaaatgtactttctgttatccccggattgaggccggcgatcctacggtttgctccgaaacctgcgttggtaggctgcgctacctgggagtaatcctttatgacgcagatcgagtcagcgaggcagccgcaaccgaggacgaaactcagctttaccaggcacagcgagacgtaatgttggatccctccgatccggaagtgattgcagctgcgcggcaaagcgggattcctgagtcctttatcgaggcggcgcaaaaatctccggtctataagttgatcgtggaatattctctggcgctgcccctgcatccagagttccgcaccttgccgatggtttggtacattcccccactatctccggtagttgaggcggttaccgcttcgggagccgacggtgagaaccacaaggtcctgctgactgccctagccactatgcgtattcccttggaatatctagctgacctatttgccgctggggatccgcgcccggtggagcgctccttgcggcgcttggcggctatgcgttcctatatgcgcgatatcaacctgggcgatcagccgaacccggaaatcccggctgcggtgggcatgagtgaacaacaagtaaaagccatgtaccggctgctatcgatcgctaaatataaagatcgttacgtcattcccaccactcatcccgaaactgcccgtacccccagtgaatatatttgtccggtgggtcagggcgcgtcctcgggtaaagtcccggtggaaattgggagggcgccgcggtgaactccaaggtttctttcattcctacccggcaggaggcgcccccggtaaacgcggtggctctcgagccgaaccagcgctctgctgctcttatggcatgcgcgctgcttttggattatcccggtgacaacctagagaaaatcctttcgcaggtaaaagcagaagctgagctgctacccgaggctatcgggcaagagctacgagagttttgttcctgggctcgcatgcgcggggttcgcggggtacaagaggactacgtagaaacttttgaccgtaaacgccgctgcgccctggagctaacctattacgccactggagatacccggcaacgcgggatcgcgcttacggtgttttcagatttatttagcgccgtaggatttgaacctccccaccgggaatctttacccgactatctacctcgggttttagagttggcagcccgctgtgagggcgaagatgtagctttagtgttgggcgcgatcgccgccagccgggagggtatcgaagtgctgcatgccgcgctatgctctctggattctccctggcaaaaaatagtaaatgccctgcgcatggtgttgggagaagctgacagtgaaaccagccagcgcatggagcgcctaatccgtcaaggcccgcctaccgaattggtgggcttagacgacagtaataacttaccgtggccacagttagccccggttcaatcagacaccgcgagcgaagggtgaagtcatggacgtattgttttggggagtatttccctacatttgcattacgctgctagttgccggtcttatctggcgttaccgctctgaccagtatggatggacttccgagtcctcacagctacgggaagctaaaatcctgcgactagcttccccgctattccatttcgggatcctgttcgtactggtgggacactttatggggctatttattcccgactggatgaccgagtctatgggggtcacccagcatcagtaccacctgctagccacttttgggggcaccgtggcagggattgcggcgctggtcggttttattggtttactgtggcggcgtttcgtaaaccattcggtacgtttcgctactaccggccgcgacctggtggcctatgtattcttggcgatccccctggcgttgggggcaatagctactgccgccaaccagctttttggagcagatggcggctataactatcgcaagacaatttcggtgtggctgcgttccctgtttatgctgcaaccgcgagtagatctaatggtcgatgtgccgctcagtttcaagctgcatattattgccggcttgctgctgttggcggtctggcctttcacccgcctagtgcacgtgctctcggctccggtgggttacgttactcggcctccgatcgtttaccggtcacggcgccccgcgactgccgctagccctgaaaagccgggctgggccccggttcgggctactgctgctggcggtgaggacgcaggaggagcgcctgcgcagggagcctaattcggggaacttttactaggctgtcggactgagcttcgtgatgccggcagcttcgtagttttctccctatttattccgcgctatcaaggcttttccgatattttcctcgaatttacgataatctgtgcctatgccaaaatatcgtatatctactatcgccaacctgctaggggtcagtgatgacaccattcgccgttggctcgatgaaaacctaatcaaagcagttaccggatctggacccaagcgggtggacggcgcctcagttgcccgtttcttgcaggaacgacctagtgccatacatctgggagaaaaacctaaccagtcaatccgtaaccacttccaaggtctagtgatagctctgaaaaaaggccaagtaatgagccaggtggatctgcagtgcgggccctaccgggtggtttccttggtctctaccgaagcggtggaagaacttaacttagaggtaggttcagcggctaccgcccagatcaaagcgactaacgtttcggtgcagctcccagaaggagaaaaactgtgaaaaagtttcgtcttctcgccctagctgctgggcttgctttgaccctcggtgcctgctcggcttccggaggtactaaggccacagaaagcaagactccgactgaaaaaacccagttaacggtgttcgctgccgcctccctaaataaagccttcccggaaatagtagagaaggtactgaaaaagtccgaccccaatatcgaggtaaagttttctttcgaaggttcatctaccctggtagatcaactaaagaatggcgcggcggccgacgtgtttgcttcagctgacgaaaagaacatgaccaaagcgaccgatgcggatctggttagcgaggttaaacccttcgcctccaataccctggcgctaatcgtccccaaaggtaatcccgccaagatcaccgggctagacgcctctttggatggcaaaaaactggtggtttgcgccgagggcgtgccttgcggcaatgccaccaaggaactgcaagaaaaactaggcgtcactctgaagccggtatcggaggaacagaaagttaccgatgtgcgcggcaaagttgaaagcggtgaggccgacgcgggactggtttaccagaccgacgccctagctgccggagacaaagtagagattatcaaagttaagggaatcgaacaggtagttaacgcctacccgattactttggtgaaagcctctaacaaccaggaggcagctaagaagtttatcgcggctgtcctgtctgacgagggcctaaagatcctggaaaactatggtttctctgctcccctgtcaacagataagagctaacacttcccttgcgtaagtctttcggagctaatcaagcggcgggatctccagcttggctgtggggccccgccaccttggcgttacttttcctgctgatccctttcgccgccttggtgatgcgggtacattgggggcagattccacagctactggccactacccaaagccaggacgctctttggctgtccttaaaaacctgcctgacgtctactgcgctgtgtattgtctgcggggtgccgctcgcgttgtggctcgcccaggcacgcaatagtttctttcctcgcctggtacgcacctttgtcactctcccgatggtattgcccccggtcgttgccggtctggtgctactaatcacctggggacggatggggattttagggtcgaagctggatctattagggattcagattgggttcaccaccttggcggtaattattgcccaaactttcgtggcgatgcccttcctgattacttctttagagggcgcgctgcgcactcggggtttccaatatgaggccgcagcccgggggttaggcgcctcccgcacccgaacccttctacaggtaactttgccgctatcggcacccgcaatcgtgtccgctactgccttagcgttttcgcgttgcctaggagagtttggggcaaccattacttttgccggctccctgcaaggtatttcccgcacccttcccctagaggtatatctgcagcgcgaaaccgatactgacctggcgctttctttatctttagtgattattgccctggcaattgtgatagtaggtggcacccaggtactttccgacttctggtactcacgcctgatggggcgacaaaagcaaaacgacgccccgggagcagtaggcgcgattagcggtctttccaaaaaagttgcacgcgaaaaacaggctggccccggggtgcatctggatgcgaaaatcgcggtgcgtaacctggatgtggatttagattttgctcccggctccgccaccgccttgctgggcccgaatggggcgggaaaatctaccattatttccctgttggccggaacactggtaccggattctggctctattaaatggagcgtcgaccagccccggattgtcctcctcgcccaagacccggcgctatttccgcatatgtccgtgctgcgtaacgtagtgtttgggttgcgctgcttagggatcgataggccgcgcgctgaaaagctggctcgcgcccaactagactccgtaggcatgcagaccttagagcgccgccgtccccatcagctttccggcggtcaaaagcaacgcgccgctattgcccgggcgatggcgattgaaccggatgtggtgttactggacgaaccgatggcctccctagacgtagaggtagccgatcagctgcggctgttattgcgggaacggattgggggtgccaccactatccaggtcacccacgacctaaccgatgtgattgccttagattgccaggtagtagtgctaaaacatgggaaagttactcggcgcggctattggcgcgacctattcgaggaaactgaagatcggttcttgcagcaactaacccgcaaagcccagctagataacgctattaaataggattcacggttagctttgtaggacaacgacgggtgggaaatctgggttaggggtgcttgcaggctgcaggtaagctaacatccatgagcatgtcccgttccgcgaagagcggcccgatcgcttcctcctctgcgtcttcctcccaggctgcctttaaggtcgtacctactccgattaccgccgaagaccgtttaatcgccgattttagccgtaatctgcatactcacccccgggtgctggtgggcaccggagatgattgcgcggttttggcgcatcctgattctcgctccgttatttccaccgatgtgctggttgagggagtacattttcgccgcgactggatgagcctagaacagattggccagcgcgcggccgctcaaaacgccgccgatattgcggcgatgggagccagcgcccatagcgcggtcgcggcggtaactgttcccaaagaaatgggcaagactgagatgaatgccttggctgccgggctgacaaaagggttagagagttacgggtactccctggtaggaggagatttatcgcgcggatcttgcctgcaggtggcagttacggttatcggggatttacaaggtcggtctcccctgctgcgcagtggggcaaaagcgggtgacctggtgtatttctccggcaatctgggggattcggctgccggtttagcgctgctagaacgctttcaaagtccggcagtggcggtaaatgatcctgcccttcctaaaaccttgcacaaccttgcggatgaggtgatttctcgctatcaagtgccgcaggttcctgccgatcttgcgccgcaactggcgggggcaggcgtgcatgcattgatggatgtttccgatgggctcacccgtgacggagcgaaaatagctgtcgcctccggagtggttattgatttacagcgtgaactgttggaaaagtacgcgagccggttatcagggcttgctcatgccctggggattaacgcttgggattgggttttaggcggcggcgaagaccacgggttactttgtaccgcgcccgcaggattttcgattcccggattttccgccattggacgggtactaccagcaaactcgcctgggcatacggaatgcagcgaaagtagcggcgaggacgcaggggtcactaatccccactcgtcctcaaaagaaagcctaggaacagagctgttaatagatggaaaactgcagtgccagcaaggttgggatcattttgcctcttagaggcaggagttaaaaataaaatttaacgcgaaaaagctaccagtggtggctccgaccggcatcgatccggtgacctttcgattttcagtcgaacgctctcccaactgagctacagagcctagcggtctaataagacctgcgacccagacgggactcgaacccgcgacctccgccgtgacagggcggcgcgctaaccaactgcgccactgggccatatttatttatgtttctccacctctcggcagatcgtacccccaacgggattcgaacccgtgccgtcgccgtgaaagggcggtgtcctaggcctctagacgatgggggccttgcggcctggcccaaaggcctcggctcagacttgaattagcttaccgggcgaaggtgagtaaaggcaaagtaatcatctatgaagcctctcacaactaacgtttaccgcgttgtttaagggtttaataactgcattttttgcccgcgaaacgtagtctagatatatgcagctgcaaccttggggaacatcttcatccgatcaaactgtcgaaaaagtattcgactggttaactagcctcgccggtatgggcgtgggggtagtctctgggatagtgctggcgttaatcgctactgccattttgaagctggtgtcccggcggcaaccgctcacgaaattgatcctgaaccgcgctacccgcgccttcttcctcaccatgataattttgggagcctatctgggctggaaatacaccacctccggtctagaaattgaaagttctaccggaattgggcgctttagtcatggactgctggttgcagtaattttggcgtttactttccttactacccgaatctgctatctgattgaggacgtagcggtcaaggctaaccaagagaagccctctcgtaaccgttcgaaaatgctcacccaagcacaggtgattcggcgcgtcctgcaagcggtagtggtcgtggtggggattgccagcgcgattttaaccttcccctctgcccaggtggcaatgggatctatgttggcttcagctggggtggcctcgattgtggcaactttggctgctcaatcgaccttggcgaatgtgttcgccggggtgcaaatggcgttgtcagacgctctgcgggtaggagataaggtacaggttcctggtttagacgggaaaaaagaactgggcacggtagaggaaatcaccctcacctacgtggtgcttaatctctttgatgaacgccgaatgattgtgccttctacccatttcactcaacagaagttcgagaactggacacgcaaacacactcagcaggtgggaatggtggagctctatctcgactattccgcacctatcgattcgatccgcgcacaagtggatttgctgctgtcgggcactgaactgtgggatggacgcagcgccagcgtcgatgtttccgatatgaacgctgattgccagactgtaaggatctccgtttctgcggtagacagcaatgatttgtgggtattacggtgctacctgcgcgaacagctgattcagtggttggtgaaagagctgccttgggcgctggtttcccgccggattcaaccgcaagaggttcgctacctcagccgtgaccgttccgacgaggaagttcaccgcctggcacgcaagttggtaggcgaaaatcagccagagaaaggctaaatgatgagtgaatttgatccccgcaccgccagcgagacagattggcgaaaccgcctggatgctaacgaatattacgttttacgcgaggccggaaccgaacgcccaggtactgggaagcatctctacgaaaaccggcaggggatttaccgttgccgaggctgcggggcagagctgttccgctccgacaccaagtttgattctaactgcggctggccagcttttttccagcccgaggacgccgctgtcagctatcaccgcgactcctcgcacgggatgatcaggaccgaggttcgttgcgctaactgtggctgccatctaggacatgttttcgaggacgcgccggatatgccgactgggcaacgctattgtattaactctatctgcctggattttcaagccgaataatatgcggataatcagcgctaatctggagcatggtaccccggctgaggggcaaactttgcctgggaatcgctggcaggagctggcgcaactgtttgccgctttccgccccgatgcgatctgcttgcaagaagttgactattaccagttgcgctcggggttccaagaccagacccgcaccctagccactgccttgaataaggaaaccgggcaggtctggcagcaccgattcttaagttttttcactggtcaaacggctttcggactgagattgccagtggcgttaactactagcgccctcgctaatcaacaccgcttttttcaagctaatcgacccctgctgggcggatacggagtggggatattaaccccccatccggtgcgccgctgggtgagcgccaaactgggtgcggctcccccacgcatcaaaattgccgacccagatccgcgcacctggaaattctatggcgggcaaacccgcagcctgctaggggcagaaatagtaactgcaaatggacgatttttactgggcagcacccacctagagctgggagttgctaccgcaagacggcagctagtccgctcctgggagggattgtctttgctggcggggaaagcaactccgctgctggtgggggatatgaatcttcgtgaggaggtatctcgcgccctctacccctacttgtctttcgcgactgcccccactttcccagctagtgagcctcacttccagattgaccagttatttgctccccccacttgccaaatcttgggaatagacactatccaaatgccgatctctgatcaccgcgcattgtttgtcgaattacagtcgtaactgtagggggtggcgatgggtagcgcgcggaaattttctgatcggattccggcgcctttaatttttgtgggctctggtttgtcgcaatattcgggcgcggcggtcgctactatctggttgttttccctgatgagtcccactacagtggcctggtggcgagtggcgatagcagccgttatcctggtgctgattcgccgtcctttccaccgcggcctcacctggcgggcgctggcagcagcaacggttttggggttattcatcaccaccatgaatatgactttttaccaggctatttcgcggattcccctgggtacttgcgtctcgattgagtttgtggggccggtggtggtggcactttttcgaggacacggctggcgcactcggatcgcggcgattcttgcgggggtgggagtagcttccatttccgggattggcctggatatttccactgcctcggcacggatcgggttggcgttttcgattgctgctggtttttgttgggcgggctatatcgtagtagggcaaaaactcgctgccgccggtcatggccaagattctttagcgatgggtttatttatcgcagctatcctgacggtgccgatagtagggccgttggagatcgctaaggggtggcaaagtggctggatcttgttttgctgtattgcggtgggagtgctttctacggcgttaccgtttcctctggagcaggtggcgttacggcgcctaggtcccgacattttttcgctattagcttgcctaatgccggcgattagtgagctggtgacgatggcagccctccgccacctgccaaatgctggagaaatcgtgggattactgtgcatttcgctggcggttgcttttgcacaataccgtccgggaatgttaaacaggaaaagtacggataatagctagagaaagttttggagaagaaaatgggtttgattggttcgattattgctggtggcatcattggtgctttagctcgcttctttatgaagggtaagcagaacatggggatgatcatcaccatcatcatcggtatgatttctgctggtctgtctgattggatcttggccaaggtaattggtgagggtcacggtttcattagcttcgtagtggcgattgtgattgcagtcggtttgattaccgcctacctgggaattactaacaagaaataaaactagccccggctacctaacggttttggtggctgcggctcccaaaatctagaagacataaagctgctgtccggcaagttactttgccgggcagcagctttttgctatccctgagcttaacccctctaactctaaagtagttacctgagggttttgaggtcgggtgagcaccacaagatttttcccgctaagcaccgaggtctggactgttgaaaacctttacattgcggcgaaacttcgccattgggaacgaagttttccgcaggttatccccaggcaacctgcaaatgctaacgctcaggcaggtcaaagcctcaataccgctatgaccagttcaaacccctaataccctcaaggtttacctgagggtaatcaagaaaaatttgacatttccggctttaagactttggttaaaaaagttatccacagatattatccacaggggtgtgcgcgaatataaaaccgcagcgaaacctgtggatactatctgtggatgattgcccgacttactcgttaagagtgcgcccggtgagagtttcgtagatttccttatagcgaccggatgtttgcttcaccacatctgcggggatctctgggggatcctgtaacttgtatggctgccaatcgcaggcatccgaatccacccagtcccgcagaatttgggtgtccatccggggattatgcttgcctggctcataattatcggcactccaaaaacgcgaagaatccggagtcagtacctcgtcacccaagaccacggcctcgcccccatagggtagagccgaaccgaactcgaacttggtggatcctaaaatcaccccgctatcgagggcaatcttggctgcacggtcgtagagatccaacgaatactcgataatcttatctacccgaccactgccaactagcgactgcaacgcttcccaggaaacgttgttgtcatggcgacccatctgggttttggcaaccggattgaaaactggttcctctagcttttgatcctgctgcaaaccctcgggcatccgcgccccgccgatggtgcctttggcctgatactcacgccaggctgccccggataagtaaccggagacatggcactccagagggtacatatcgaggcggcggcaaatcatcgcgcgtccagctaccatctcgggtaccgaggaagtggataggaagtggttgggaatagaatcccccaactgctctagccaccaggtagtcaactgggtaagcgcaatgcctttacccggaatttctgtaggaaagacctggccataggcactgaaacggtcagtagctacaatcagaaccgtgtctgaatcgtacgcggactgccccgcaggataatagatttctcgttctttaccggaaaataaatggcgccatccacgcagcgccggagtatcacttgacgacatatttatcattcttacactttttatttagatatgggagggctgcagcaaaatttctaaaaatttctgtggctataataggaagcgctaacagaaaattaggtatagccaagttggaggtactcaaactttgcatcaacatgctcctgccaccgaatccactcgcaaccggttactgattgctgccgggataacttttgcgatcctggtcgcccagctcatcggatctatattgtctggctccctagccctagctgccgacaccggtcacgtagcgatagattccatagggctattcgtagctgcattcaccgccactttgttaacccgccccgccactgactccatgacctatggttacgcgcgcctagaagcaatcgctggcggtctgcaagcagggatgattattatcatctgcacagttattggctaccacgggattcttcgcctaatcacccctgccccagttgacggcacccaaatggcagcctgggctctagctggattgatcggcaacttggcatctatgctggtaatgatggggcggcaccgcgataacctaaatattcgcgctgcgtttttggaagtgtccgtcgatgcgatttcttcggtcggagttatcgccggaggaataatcacccgcctaaccggcattacccgtgttgatgcggtgatttccctgctgattgccggagcaatgttgccgcgtggctacaaactgttaaaagaagcgggatcaatcttacttgaccgtgttcccagcgatttgaacgccgaccatatccgcgagcatattttggaggtagaacacgtaactggggttcatgacctgcacgtatggccgctaaactcccacaccgtgctgctatcagcccatatagttatcgccaaggaatgctaccgtgacgggcacgccctcgaggtgttacaccaggtagaagagtgcatgaagtcccatttcccgcgcagcatcgagcactgcaccctgcagattgagcccgaaggccacgctgcccacgaaaccctaaagcactagctgcggaatagcgtagctaagcacaccccaaattacctgctaacaccagcggaaatgccaaaaatgaagacacaaaaaatgggcattagcaatgtgccacaatgcctgtagctaagggtttgcccgaaggatgaggggagtgggctaccgactactgccctggaaaggggctactgcccattcgggtattaccccggtattagcctgctattagcctttaagcccaagaaaggatcaaagcatgaaaaaggcggccggaaacttttgtttccggccgccttcctctatttttcacaaaggaaagaggtaatcacccactaggtggttacttcagagcctgcaaacgctcacgcagtttcgcgagctcctcggtaatcgccttgggcagtttgtcgccgaactgcgagaagtacttctcggtgtcttcggtctcggccaaccaggcatcgggatcgatggcgaacatcttgtcccattcttcccggcccataccagtgccttccaggttgaagtcctcgaacttcgggtagtagccggtcgggccttcaatggcgtcaaccttgccagaggcgcggcgcacgatccagtccagaacgcgagcgttgtcgccgtagcccggccacaagaaactgccgtcctcgtccttacggaaccagttaacctggtaaatccgcgggaacttgtcgcccaccttttcctgcatttctagccagttaccccagtagtcggccatgttgtagccacagaagggcagcatagcgaagggatcgtggcgcagagaaccaaccgcaccttcagcggcagcggtctgctcggaggctacggaagcgccaatgaacacgccgtgtgccggggagtactgctcggctaccaacggaacgttggtggcgcggcgtccaccgaacaggatcgcggtgaccggaacgccctcgggagcttcccaatcggggcaaacaatcgggcactgcgcagccggagtggtgaaacgggagttcgggtgagcggccttttcgccggattccggagtccagtctttaccatgccaatcgatcaggtgatcgggggtgtccccatcgatgccttcccaccagacatcgccatcatcagtcagggcaacgttggtgaagatggagttttccttcatggtctccatcgccatcgggttggtcttgtaggaagtacccggggctactccgaagaagccagcttcggggttaatggcgcgcaaggtgccgtccggtccggggcgcatccaggcaatgtcgtcaccaacggtctcgaccttgtaaccggggatggtgggctgcagcatcgccaagttggtcttgccacaggcagacgggaaggcagcagtcacgtggtactgttcaccggacttttcgtcggtcagacgcagaatcagcatgtgctctgccatccagccatcgcggcgagccatggtggaggcgatacgcaacgcgtagcacttcttgcccagcagggcgttcccgccgtaaccggaaccgaaggaccaaatctcgttggtttcggggaagtgggtaatgtacttttcgtcattgcagggccaggcttcgtcagtctcgccctcagccagaggcttgcctacggagtgaaccgcaggaacccaaggacgtccctcgttgatgagatccatcgccttggcgcccatgcgggtcataatccgcatattgcagaccacatagggcgagtcgctcagttcgatacccagctgagaaatcggtccacccagcggtcccatggagaaggggattacatacatggtgcgaccagccatcgcgccgtcaaacttttcgtgcagagtttcgcgcatctgcttgggatctgcccagttattagtgggaccagcatcctcttctttttcacagcaaatgaaagtacgcgattctacccgcgccacatcggagggcagcgagcgagccaggaaggagttggggcgtttctccggattcaagcgggtgaacatcccagtttctaccatgagatcggttaggcgagtccattcctcttcagaaccgtcacaaaattcaatcgctttgggttttgccagttctgcaactttaattacccagtcaactacgtctttcggcgcgttctttggggcggcagctagcacatctttctcggtcactgtcatttatctcttgcctcctgcggcactcgacacggcaacacttagttgctcttgctcttctattgtccttcatccccgccgcattctctaccgtggaagtcaaaaacttccctaaaatcactatgacctggctcatattaaaggtaactttaggccgtaggacaccttcctaagcgatttttgaggaataactaaaagctttaaacccggccgcgagggttattacagtatgatgaaaggaaagcgaaacagaggcggcgggtatttataccggcactcaaggaggcagcgaaagtgaaacgcaagcgacttttagcgttagcgctactgcccttggcactgttgctgtcgggctgtgaagctagcacccagatgcagatttacgagaatgacacgtactcgtttagtacccatttaactcagccgcgtaccgctcaagatatcaagtgcaaagaccagatcccggggatcgaaaattacctgaaaactgcgcaagtcgcgataaaggataaatctaacgatcgggtttctgattgcacgattacggtaaaagcgcagcacatttcccaggcgaagaaaccctttgtgaccattaaacatataggcgacagctacctggtgaaactggaaccggtgcagagcctagatttcttggacgcacaaacagatcagttccgcctgactattactttccccgggccggtattgaaaaccgacgccgattcgggagcgcaagtaaaagacaataccgtcacctggaccaccccacaagccctggtcaaggggtttgaagtgcgcggacaagatcaccccggcataactatgaaccaaaaatggggaatcgggttcttggtgattctagtagcgctagcggcggcgctggtaatcttccgcaaacacccgcgcatcgccccgatctggaacaagctaatgcaggctttgggaattatcggtgccgcctgccgtaatcttttcttccgcgctttaagctacttggatcttggcggttcttccactgggcggcggacaaagcgttctcggcgacgaggacgcaagtagggttttactttttcctttacgatttcctggttcccatttctcccaataatcgggcgtgtccccaagggtagataatcctgcaatttcctgagggcgctctgtcgggtttgctcaaaacatcggtctagttccaacctgagtttgctcgtatagcctcattccaaaggagccggtggtgtcggaaactctacaaacaatccctaggcacgtatccagccagactcaacccgaccctacctgcttgatctggggttttaacccttctgaaatgcattttttatcccaaatgctaactctcaccggttttcacttcaccacttcactttcaccccctaccactgctttgcacgcagttatcgcagctcaaacagctgaccctaggcttttcccacagaatctgccagtaattccagcgactttttccagggcaaccccgccggcgaagggcaaccccgcgccagctgccctgtcgcaacggcccaccgtagttccccgagcgactacatcgcagacaaacttgggtgtagctgctgctttccagcttccccggcagatagcgcccctactggcaaaactagatcagtgctgctatcccccacgcggacaggtaataaacgttttcggggtagagccgggcgtcggcgcctccacgatcgcttttggcttggcaaacagcgtgaaaaattcactctatgtggatgcagccagccaatttatctcctccaggcgcacaaaatatgcaaaggggccacgcaagctgggcttttcaactgttccccacttttcttctctcgagattgccagcgacctgctagtttcgcgtttgcggatagttttgcctcacctagaccaaactcgttttttgcagcttgatagctggcatccgtctcatgtatcccggatactttctctgcttattcgctcattttcactggtggtcgtggattggggtcagctacaatcttcgcgcaatccgcttgagttaccggggaaaaccctggtgattcacgattatcaaactgcagcacaaaatccccagaccttacgccaactgcaccgtcaagggatgctgctagtgaataatcgtgcttcaaaactgatatccacaagcggtaacagaaaattttctttaccccattgccgcgagttaaaacgcctccaagctcaaggcttaggttctcaaaccccgcctagcttcaagacgcatctagcccgacttttgcaggaaattttagaggacggacaatgaatggtcttctagcagggctgtgccgcttagcgaaaaaatctactgcgcagccagaagcgacggtttccagctcagatctgcgcttgcaggtggcagccggcagaactcctgccgaagtggtgcgacaagaaagttccggtagtgcgggaaccggacaactcctagcagatttggcgaatataaattcctacctggccggatttggcccgctacttgctcccctgctgcaagatcctttagtgaccgatgtgttgataaacggcccgcaacaagtttgggtagacaacggtcacggactctgcaaagttgaaatcaattttggttctgaaccggatttacgggctttagcggtgcgcttggcaggggcggccggaaaacgcctggacgacgccgcaccgattgccgatggcactctcccaggcggtattcgcctgcatgctgtactgcctcccctggcggttccctctccagttatttccctgcgctgtccccgcgcccgcggactgaactttacccagctggtcaaatcagggacggtagctaccgcattagcgccggtagttgcagctttagtgcagcgacgcgcctcctgttttatagcgggagctaccggcagcgggaaaacgactctgctatctgccctgctggaactggtgccccctaatcagcggattgtctgtatcgaggaggtgtctgaacttttccctacccaccctcacctggttcacctgcaagaacgcagcgcaaatgtgcagggcgtaggcgcgattcccatgtcggatctggtgcgggcagctatgcggatgcgcccggatcgcatcgtgctaggcgaatgccgaggggcagaagtgcgtgaggttctctctgctatgaacaccggtcacgaaggcacttgggcaacggttcacgctaacgcggtcactgatattccggcccggctggtggcgctgggagccctggcgctcatgcctgaatctactattggggcgcaggtagttgccggggttgatgcgttcttgcagatccgccgggtaactgagcgcgggcgaacccgccgctatatttccgagatagggattccggtttgggctgattcccacttgtcagcacagttagcattaaaagttacccccgagggtcaactgctgcgagcgcccggatggcgctcactatctgagctggtgaatatggactttacccagcttgcggaggcgatatgaactggggaaccaccattttattaacgtttttactgttggttgcggggattccttggcatttaccggatgcgctggcaccggaaaggaagggcgcatatctatctaggcttaccgtactttttgagcgcaccaccgctttcttcaggcgacgctttggagtgaaaccacacctgtccgccgcagtagtcgaagttgctagccgcctaaatgcgggagccgattccacttcggcctgggtgaaaaccttgccgcgacacggatttgcttgcccaaaaactgcgagcacagctgatctgcaggtcgctatcgaaccctatttaaccacttgggaacaggcatccctcaccgggttactcgccgcgctacgtttttctgaggcagttggcgctcccctatccgaggtactcactggttgcgccgactctcttaccgaggcttcgcgggctgctcgcgcccgcaaacttgccctaaccgccccgaaagcctcggccactattttggggcttctccccttaggaggaatcgctctcggcgcggtgctaggagccaatcctttgcgagctattttttccgggggattagggacaatcagcgctttgctcggtctgattgccctatgcggcggaatgttgtggatgtttcgccttgtagctcgggctgaaaaggcctagtcatgttttttctagctatctggatttttctaggagccttaccctggttcctacctcggcgttcctccctggaatctaccgttagtcctaaacagacagcccctatcgacccggcagtaatcctcgatttggcgagtgcggggctggctgccgggtcttcgattccccgggtactttccgccctggctactgcctgccaggaaccgcgcttagcagtggtttcacgcgcgcttattttcggggttgcctgggaggatgcctggagtctgctaacccagggcgacaagagtcccgaatgggcaaagtatctgtcccaggcactagagccggcctggaaagatggagtagcgcctgacgctttgctgaaaggagccggaattagggtgcgagccggcaaagaccagcgcgctcgccaggccgcccaaaagctatcggtgcgcctggtggttcccctaggaatctgccagttaccggcatttatcctcctagggatagtgccggcaattctggcgggactagagaaactctagctgtccgaatcagacgattgtgccgcgcttgcctgcgctttacctgattcgtctaactcgtcctcgttcaaagctaatcccgcgctcaccagggactggttacgctcgcgcgccaccgcgtcatagtcgtatgcttgcttcatccggccttgggcaagatcaataatcaggccgagcaccaacatagccaaggagggtattagccaccccaaccctagcgaggccagcggaatcgtgccgtcaatccacttctccattaccccggcagctttcaaaccatcgaagagaccgaagattccggctacccagaccgacaatcggtaagcccaaaacatatggccggggataaagatatccaggatgcaggtgatcaccagcatgatggtgatggggtagcagaacatcataaccggaataatcacattcaccagcgcctctaaccccaggttggcgattgctagagatactactacgtgcagcaccacccatacgggacgggaaacgttcgggaacaatcccctaaagaactgggtcgaagcctcaactagcccaatggcagtagtcagacaggccaagatggcgatagcgcccaatatgaccctgccagtcgagccgaacaggtgctgcgccgcgaaggccagaccttccccaccgtccttaacgtcagggttcaaccgacccacgcgcgatcccaccatcgacaggccgaaatagaccagccccaggaagaaagcagcgattacgccagaaagagcagtcaccccgaaaagttgccttccgggtttgaagcctttctgtcgcagcgccctaataatcactaccccgaacacgaaggaagcgatggcgtccaaagtgccatagccgtcaaaaattcccttcaaagtgggggtggaagcatatttttcaatcggcgcagcctccgaaggagacatcgaagccaccgcagcaataatcattactgccaacagaatcaacagcgccggagttagcagacctccgatacgatccaatacgttgcgcggattcagacacaggtaaccagcaatcccgaagaaaaccagagtgtaaacgaatagccacaggtgggaatcacctgcagtggattggaatgacatcgcataggaggcagctcccgtacgcggaatcgcatacagcatcccagtagagaggaagatcagccaacaaaagaccaagccgggatagtgagcaatccgttcaataatccccaacaccccggaggaggaagttgcagcggcaatcatccccgccatcggtaacagcaccccggtgagcataaaaccaatggtggccggtacttgttcggcccctgactgcaccccgatcatcactgggaatatcaggttgccggcgccgaagaacatggcgaacaacgccaacccggtaaccactacattgcgaacacgtgtattgctattcatggcttagtattctccactctcaattttttcaaccgttctagtgtcgcaaagccccgcctcgattcaaaataatcttcccttattgaatactgggttactatgtgttaagcagtaagtttgttcttttgaatgtggtcaaatttacaaatgaccaggtgaggtgagatctatgcacactgacgcgcagatttcccccctcgatgaatatttccaacacttatccgccttgctctcccttaccccgatcctgcgccgtaatcaagtaatccgggctgttcgcctcgcggcgcggcagatggaggaaaccggagctctgcctgccccctatacccgcgagcaacttcatgcttatctgggtactcccgaacaggtggtggccatagcagatgcggatgtaaccgtgattgcagctggcaacggcacccaagttatccaggcggcagagaatgctaaattcgcagaggcgccttggggaaaggctgctgccaaggtgcgctccgaggacgcacgacgactgcgcaaatatggtcaactgataggttggggagaaaccctgccgacagcaccggtgcaaccggatttactagacagcaaaattgaatcgctggttaattcagaccgcgcccggcataaccttttcgcctacgttttgccgattgcctttggaatagcctgcatagctaccgccctgctagttcccttagggttcttcttggggatgtttgccttggcattattgttttacctttggcgcaagcagatttctcccctgtggccgcgcatcttctgtgctttggctaccctgtttgccattgtttgcaccgtggtcgctactttgcgcctgctcggctatgactcttaggggcgcctgctttcttattacagcttttaggcatcgctagtttttagttttctgcggccttttcccggcgcactgccgccacttcgaatagggcaatcccggtggcaactgcggcgtttaaagattccacttcggaggaaatctcgatccgggtgagcagatcgcagttttcctttaccaagcgagaaatcccgtcaccttcggctccggtaactagcgctaaaggacgatctgccagatcggattcgcgcactgaggaggttccgccgccatctagccccagaacgaaacagccttgctctttacactgtcgaatcgcgtttaccaggttagatactcgggcaactggcaggcgagcggcagctccggcggaggctttccaggcagtcacattcatcgaggcgctgcgccgaccaggaatcactaccccgctagctccaaaagccgccgcgctgcgcacaatcgcccccaggttatgaggatcagttaccccatctagcagcacgatcagtggcttagtatgattattttcggcattttcaaataactcagcgagatcggtgtactcaaactcgggtacctcgagggcaacgccttggtgaactgcgccctcggtagctaaatctagatcggagcggggaacctccacgatgggtgctccttgggtgctagcttcacttagcagcagggaaagtttcttattggctgctagatttcccgccacaaataccctggtaaccgggatatcggattgcagagcctccaataccgggttgcgtcccgcaatcagttgatgtccccgccgcacctggatcagggaacgcttggcgcgcgccttgcgttgggctgtttgcgtttcttctcgccgctctttttggatacgggcgcgataagctgcgtgataggggcgattctccgctttcggggtcggtcctttcgcccgcaagccgcgttttttaccgccgctgcccttgggggcgcccttcttatcggtacgcttcattctgccgtggtgatctccgcgaactgccatctgaatcccctaccctaaatgccaagtggagccgctggctccgtcctcaataattattccggcagcgcttaagcggtcgcgtatcccgtccgcgcgcgcccaatccttttctttgcgtgcctgcaggcgttgttccaactggtcagcgaccagcttttccaaggcagcggtggcagaatcgttaccgctgtcggtttcccgccattgctccgagagaggatcaagccccaaaatctctagcatggcgcgaatctgaatcgcgacctgcgcaccctcgtcagatttcccgccttcaaaagcggtattagcttgcttgattttttcgtgtatcaccgcttgagcggccgcgatattaagatcgtcgtccatagcttcgcaaaaagcctccgggaggatggcctctgctagctcctgggcgctggcggtagcgacttcgggagccgcctgggcaaagcgcgtcagggaagaggcaaacttattccaggtttcgccggcctgctccagggtttccggggaatattccacggtggaacggtagtgagtagttcccaaagccagccgtaataccgctgccggggtagttttcaagatttcggaaaccaccagggagttgcccagcgatttcgacattttttcacccttaatggttacccaggcgttatgcatccagtatttagcgaagggccaaccggcgccgtgggattgcgcttgctcattttcatgatgggggaaccgcagatcaatcccgccaccgtgaatatcgaaagcttcgcccaggtagcgccgcgacatcgccgagcactctaaatgccagccgggacgtcctttaccccagggcgaatcccacttagcggtttccggttcgctttcttttgcggctttccagagggcgaagtcgcgtgggtcgcgtttgcccgcctctatttggctatcgatttggctctcgtcctcggtcgtgcgcatatcagaaagcctttgccgggtcagcgagccgtaatctttgagggatttaacatcgaaatagacgttaccgttcccgtcactataggcgtgaccagcatcgataaggcgcttagtgagggcgatttgttcgggaatctgcccggtggcgcgcggttcataggtcgggggcagcacccccagggcgcgataggcagcggcaaactcttgctcgaagcgataggcccatgcccaccaatcccagccggcctccgcagatttatttaagattttgtcgtcaatatcggtcacgttacgcacataggtaacctgatagcggctccgacgcagccaacgaatcagcacatcaaaggcgattgccgaacgcacgtgcccaatatggggagagccctggacggtggctccacagaggtaaatccctacgtgcccggctttcaccggctcaaagtctacgatgcggtgacgggcagaatcataaatgcgaaggctcatgttcccatgctatcggcaagtgcccttttgcccgaagttttcccagtgttctgccgatgcgaccctatattaacgataagtagattgttccagtaaaagcggcgaggctaccaactcgagcgcaagacggataaactcagatagtaagcgtgcaaacgctggaaggaaaatcgccaccagccttgccaaaatccttattcgagaggaatattcatgcccgcactgattgttgtcggagcccaatggggagacgaaggaaagggtaaactcactgacctggttggtcagagcgttgattgggtggtgaagtttaacggcggcaataatgctggtcacaccattgtagttggggatcaaaagtttggtttacacctgattcctgccggcatcctctcccccacggtcactccggtaatcggtaatggagtggtagttgacctggaagtaatgttcgacgaaatcaagatgctggaagaggccggggtcgactgttcgcgactaaaggtttcgcttaacgcccatatcattcccccctataacaaagtgatggatgggctggccgaacggtctttgggtgaccgcaagattggtaccaccggccggggaatcggaccgacctatgcggataagatgaaccggattgggctgcggattcaggacttatttgatgaatcaatcttgcggcagaaagttcgctcagcgctaagcggcaagaactttgtgattgaaaaacagtttgccgaagaacctatcgacccagaaactatttctgatcagctactttcctatgttgaaagagtgcgccccatggtttttgattgcgctaaagagctgaacctggctctagaccgcggagaaaccgtgcttttggagggagggcaggccactatgctcgacattgaccacggcacctaccccttcgtgacctcctcgtcttgtaccgcgggtggtgcctgctcggggtcaggaatcgggccaactcgtatcaaccgggtcatcgggattgccaaggcctacaccactcgcgtaggcgaagggcctttccccacggaactttttggaaaagaaggtgaggaactgcgtaaatccggcggagagttcggggtaactaccggacgtgcgcggcgcaccggatggttcgattcggtagtttcgcgctatgccgctcgggtcaatgggcttaccgacttggtgattaccaagctggacgtgctctctaattatgacgagattccggtttgtgtggcctatgacgttgatggtcagcgtttcgacgatttacccgctgaccagacttctttccaccatgcccagccgatttacgagatgctgccgggctggcacgaagatatcagcacctgtaagaccttctcagatttgccggtcaaggcgcaggaatacatccatcgcctagaggagctttcgggatgccgcattagcgtagtcggggtgggtcctgaccgcgaagaaactatcgtgtgtcatcagttgcttgattaatcttttcgttcgcatcaaattggtcatctgacaccgctatttttaggtagcgcggcgcggtttgcgcagaaagccactctaataatctatcgtggctgttgtatagactacgcgatttcgttggaggtcagatgagtaagaacgagccggataacgactttggtacccgcacttggttcgtgggggaagaggaagagagtgataatactcccgaagataccttaatccccgggcagcacgcggattctgctacctctggcaacgactctttgatcgctggcgatgggctgagcgcggctcccccttctctcagtgaagatgaattatcggctggacagctagatcattccgatagcataattgccggtgctgacgagaaacccgctgatccagtagccgaaaacgcagatgaggcgggtctggagcctgccgaaaagccgattgcgcaggaactagcgactaccggggatagcgaggacaagaaagattctccccagcagctagaacgtaaatcattaagtgaacgggctgttgagcttgacgaggaaacctctgataatccccaaccggaactagtcactgctagcgaggttgaaagtaccgctgaccggcgctattccttaattaacagctcagacgatatcccggagcctatcgaggaagaggctcctcattgggattctgtagaagagactgaacccgaagaagtgctgaccaccgcggatcgggaaaagagtttcgaggaaacaattttcgagggcgcgactgtcaaacccacggttccttcgcgggcagcagcccatatttggtcacttttactcttcgtggtgctggtaccgctcagttggtatctaatttttgatgtagctacccgtttaagtaaccgcagccaagatatgttcctgcccgcttcggctttgaatgtcggccaatgggtagagctggtagcagcggtagtcgtagtgttcctactgattgtggtggcccggttctcttctttgggcgctttcattactggtctgctgcttaccgtggggggcggattcttcatggtgaatccagcaggcaccgcccatgccctaaaaccgctgctcaccgctttggataacgcgggacagcaaggacacttctaccaggcacttccctctaatatcgcccaccacctagcttggtcgggtggatccgggatgctgctatttgcgggacttgccctgttagggatggcgctactttcccatagcgcccggcgtgccggtcgcaaggactacttggttgaacgaaaagttaaagccgccgaggatagcgataaagctaaagaagactaactagcagccagcccgcctgggacttgtggttccacctcagaacaaacggttgctctaaacggaggttatagttaggtgctctttaggggtagggcgccactaaactgaatgttttggcaaatgcttgggggcggcaaccatatggttgccgcccccaaaacatttatttagcgtcagattttagatatttttcccagctgctagcgagcacgccgcgccaagcggtcaacgtcaatcaaggtgactgcgcgtccttctaggcgaatccatccgcgggatacgaactcagccaaggacttgttcacggtttcccgcgatgcccccaccagctgagctagttcttcctgggtgaggtcgtgaggtacgtgaatcccgtcctcggtgcgaatcccgaaacgatcggccagatccagcagtgctttagctaccctgccaggcacatccgagaacaccagatccgcgagcgtgccattagtgcgccgcaagcgtttcgccaaggctttcaacatgtgcttcgccaatgaagggttatcttccaggaacaccatcagatccgaatggtttaagaaaaccaagcgggcaggggaaaccgcagtagcggtggtggagcgctgaccgggatcaaaaagggtgagctcgcccagaatctctccgggccccagtactgccagcaggttctcacgaccatcaagggactgatgggaaagttttatcttcccttcggccacaatatacaagcggtcgccatcatcgccctcttcaaaaagattttccccacgtcgcaacgtggtctgccccatcattgagaacagacgcttctgcgcttcctgatcaagcccctcaaataggggaattctagctataaaggacgaatccaaaccaatcactccttacacaaaattttttataccgataaaaaagtacataccgatataacagtacccgcttgttgtgacttatgccacccggcagatggtgtgccgcgaaaaatttccacttttctttagaatgcccgccgcagctgagacttaaatccccccgcagaggttaaacaagtggaaaagcagttcctagtggtttctagaaacagtttactgggcggtagtttggcgctgcacccattcggatagttccatccgcttgccagtatagaacggggtgtcttggcgtacatgcaggcgggcttcacaatcacgctgctgacgtagcacgcccatcacccggttaatatcgtcggactctagggttacggaccattcgtaatcgttgagggcgaaagtcgccagggtagaaaccgctacatctaggtaaccagcaccgttgcggccatgttcggcgagcatggcgctgcgcttagccttcggcaggtaataccactcgagggaacgcacgaaggggtaaaccgcggcataggcacgcggcgcccaacccccgaaacaggccggcaggtgcggcttattaaactcggcagtcatatgagcgctcataatggaccataccggcactaggtgggcgcctaggcgggagttcaacaccgcgtgataggcatcttgcagcttgtcattggattcatccaggaaccagaacatcaggtcggcgtcggcgcggtatccggcaacgtcataccagccgcgtacggtcactcccagctcagcgattttttcctcgagttctcgcaccatggctgcccgttcggcctcctcggcaggcagcggcaaggccagctcgaaaactgcgtgcaaagagaagttattgcacgcatttacttcgtcaggatccaccttgtgatcacgaggatcgggggacacatcattgggcatcggatgagccataattttctcctttggctttctaattttgctttatttcaaactctactggcaggtcagcaccgtgcttgctgacccgggaatcttctgggggtgcccacgctggccaccggggttccagggcatcctgggcgtagacgacctcaccacctgctttttcctgggcgcgctcgttcaccaagtctgcaagcgcctcaataaagtcggaatctgtacccaccgtgggcactcgcaaatagttaagccccagctgttctgcagttgctttcgcttccgtatccaggtcatagactacttccatatggtcgcagataaacccgataggtacacaagctacatcggttaccccctcagctttcagctgcgccagccgatcattaatatccggctctaaccagggcatttgcggcggtccggagcgggaacaaaaggacaaatcccatgacaactctcgccctagttcctggcttgcccgcgccgccacctcggcacatacctgctggtgttgacggtgataatcggggcgggagtgatcggcagggccggagcattcctgcatggcgcgaggaatcgagtgggtcacgaatgcgatataggggaggcgtccactgctttcctccatagttcgtaccgcttctaccaggcgtttcgtataggatctgacgaagccctcggtagtgtagtaggcgcgcactttatccagctccagggttaacccctgctctttaagctgagcacgcgccgccgctaagtcttcccggtactgccggcatccggagtaacacacgtaagcggaggtaaagacgcacaggacccgggtaagtccccgcatcgccaggtcacaaagggtgtcgtgaataaaaggatgccaattgcgattaccgattactacttcgatttcatcgccgcggtggctgagttccaattctagggcgcggcgaatttctaggttacgagcatttatggggctgattccgtggaaacgtccatagtgggtggaaacctgttttagcctctcatcgggaactccccgcccagaagtagcgttgcgcataaagggcaacacgtcttccatttgccgcggcccgccatagctgaccaacatcaccgcatcatattgggcggaaatcttgttcaccgtgcctccttttcgccggcagagtcctgttttaaatcagcaactttcaacccggttaccggacaggtgggctctacatctcccattcccgtcaaagtatccagatctaatccccaaacttgctggagggcgctgacatattcacgccccatcccctcgcgtccggcgcggtgcgcattgatagtgggaatatgggcgagacgcgctgctaggtgtcgcagcgcgtattcaacgtcttcgcgagggatggtgtcccccttcggtagacgcgcaacttcatcggccagcacctggcggaagctatcgcgcagcgctaccactaccgagtccatcttccggtctgcgagcagcgcttcggcttcctctaccccctcggccacgatttcttctgcccgttttacctgggctttccccgcctcgggtacccgggcactgatttcttctaagttaattactcgtactcgctctaagtcggctaccccgtcctcaatatcggtttgtaaggccaaatcgagaatcgttttttcgccgcttgacagcgctaaagcccgctgtacttcctctttagtgagcaccggcgagcccatgccgcggcaggtaacgattaaagtagctgcttccaaagccgctattagctggtctttggctaccggctgcaaatcgtgtccaaaagcgaaacgttctgcccgcccggaagtggaatataccgagatatcttgcacccctttggcgcgtagcgctgccactgccgctcccgcataagagccggtgccgatcaatagcgtgggagtttctgccagaggatttatccgttcacttacgatttcgaggccgcaagccactaccgagcgcccctgggaggcgattccggtcagctgcgcgacccggcgggaagtagtcaacgctccttggcaggcgcgggtaatagtggcggaggagattcgctgctgggtggcgacccgcagagcgcggcgcagctgtccggagatttctcgttcccctatcaccatggaatccagcccgcaggctacctggaaaagatgatccagcacttcgcggtcgcggcggatttcgcaatccgtgcctaaccgggattgaatatagcgatctatccctacctgttgctctccggagagcgcaggtgcggtttcaatgatgatttctacccggttacaagtcgaaagaggcatcactccccgcacttcgggcaagcgttgcaaaagatcctgcgggagcccctcggtggtactggaagctgccgccacggcgctcagcccgtgccgcagatgatgtaccgaataggaagaaagacccacgggctcattagaccatttttttatttttcaaaaaggacccggcgatttttgctgcgttaacttttctatgttttctttttgcgcagctctaaccgttatctaagaaatataatctgccagagcgtcaccaaaagttacgatatttagcaacagacagatgcggaaaatgtgtcagaaaaatattcttaccggtttcacgctcagggagaatagcctgccttccactcttcgtcgcacttgcttgcgctggctgaaaatgccagcgatgatggaaatatgtctgagcaaaattcttttctaaaagcagtgcgcggcctacgccccgataaaactccagtttggtttatgcgccaagccgggcgttccctccccgagtaccgccgcctgcgtgctgataacggtatgctcaccgcctgcaccactcccgatctggccgccgaaatcaccctgcaaccggtgcgccgctacggggtggacgccgcaattttcttttccgatattgtcaccccgctatatctggccggcttagaggtggagatagtccccggtaaaggcccggttttcgccgaccccgtcctggaccccaaggatgtagatcgcctcaccgctcatcagggttttgacccggattgtattaccgaggccgcccagattgcctgcgccgagctgggcgagacccccctaattgctttcgcagccgcgcctttcaccttggcgtcctatctgattgggaaaacccgctcgaagaatcatctagaggcgcgagcgtttatgcattcctatccggatgcctggaaccggctcgctagctggtgcgcggatatgtcggcggctttccttgccgcccagattgccggtggggcgcgcaccgcccaagtttttgattcctgggtaggcgatctgtcacgcgccgactatcaaacctactgctgggagcattcccgggtggctattgattccgcccatgcccgcggggtaccggtgattcatttcggggtaggcgctagcgccctgctggatttaatgcgcgatgcgggcgccgaatgtattggagttgactggcgactacccctaggtgaggctgtaaaaataatcgaacatggcccgggagaccgctttgcggtgcagggaaatatcgatcctgcgattttgtttgcctctagccaggtgcgccgcgaccacgtagaccaggttttaacggaaggtaggaaagccgccgcccatatcgtcaacctgggacacggcgtgccacctaatgccgacccggcggttttacaagaaatcgtcgaccaggtacacgaatcaaactaatcaccaacgactatgctgaaggactacccgaggtgtcaggtctcgaaaaccgcttgtggcaaggagatgcaatgcacgacctagctggattagccgattatgatgttttggttatcggaggggggctagccggattaaccagcgcctatactctgcaaaaacagggcgcgcgggtggcggtgatcgaggaacgaggacgccccggcggcctgatctgttcgggacgttttggggacttcactttcgatattggcgctgaggctttcgcggccggagctaccgaagtcaaagatttatgcggcgagctaggtttaccgctagtggctccccggggtaaatcttggattttccaccatgaacgtgcaggtattcccgagggcgccctcccgattccccacggtatgctgggaattcccgccagcctggatgaccccgggattgtgcaggcactcagtgaagcagaaatggagcgcgcccaccaggacttaactatgggtccggaagtgggggcagaagaagccactgtctccgatctggtaactgcccgcctcggaaaagcagttttagagaaagtagttgcccctgtggccggcggcatccactccgccagtaccgaccgcttaaatgccgacaccaccttgcgtggtttgcgcccggcactaaaagagcacggctcgctggtgaaggcagttgccagtttgcggggactgaagccgggtaaaccggcagtgcttgcctctgagggaggaatgttccgcctggtagaaaccttagcgcagcgcatcgaagagggcggggggttgattttatcccatgtgcgcgccctcgacctggcaccggttgcagatgaatctgccgccgctgacggccccgctgcaggctcggatcaacccggctcagcaggctggaaggtgacggtttctaacaccaaatcggggccgaccccgggggcaagccccataaatatcggagaggcagtctcggtcaccgtgccgcaggtagtagtagcgctaccaggttatttagctgcgccgatgctgcgcaaagtaccaggtattgaagtcggtcagctcccgcagggagggccgatcgcgcacgtaaccctatttgttgattgcccggccttagatgcccatccgcgtggttcgggaatgttggtacagcgcccgagcagtgaagatattgaaaatggctgcgtgggagcaaaagcgatcacccactacacttctaaatggccctgggcggaagaagctgccggtaaaggccgccatctgctccgagtatcttatggttgggcgaatggaccggagattccggtatcggtcgagggggcattgcaggacgcatcccggctgctgggggtggagatttccccggatcagctgctgggatcgatgattattcactgggatggctccctgccgccctttactcccaagcatcgggaaatgaccgccaagatgctggaagatctgcgggcttatcctggtctggagctggcaggctcctgggttgccggttccgggattgccgcagtagtgcgccaggcgcaaaccattaaattgcgcggtaccggctggatcagtgaggcgaaggacgatgctttagttttgggaactcgcgcctctcgcctggcagttactcaatcagaaactgtggccacggctttgcgtgaacatgggctaaatgtgcagctgcggcaagtgcgcacggccggcgatatttcccgagcctctttacaaaagctaggaggagtgggcgtatttgccgcgcaactacgcctggcgctcctggaggaaaactgtcatttagcagtgcattcttttaaagatttacctacccagccggtttcgggtctaaaagttgcggcgattccgagccgcgctgatgcccgggacgctctgtgcgccgctcccggtttaactttggaaactttgccgccaggcgccaccgtggggacgggttctccgcgccgcgccgcccagattttagctttacgtcctgacctgaagatagtggatattcgcggaaatgttcctacccgcctgggcagagtgaaaggtattagcgctccgcaggccgattttactgatggtcgggagactcgcgaaaaaatttcgcagggcgcgcatgacctggatgcggtgattttggcggccgccggtttggatcggatcggactcggcgcttacgccagtgagcgtttcgatcccgaacaggtgctgccggctccggcgcaaggggctctcgcggtggaagcatcgaaggcggcgctagaagcgcaccccgatttagcggctgccctggaggaaattaatgacctggcaactgcccttactgctactgcggaacgagctgttttagcggaactaaacgccgggtgtgccgctccggtgggggcgtttgcgcagatggagcgagggatactcactctgactgccgcgattatttccctggatggtacccgcgaggtgcgcatcagtgattccttgcaggcggatccggagaaaacttttgccgagatgcttgaccaggcgcgccagctcggtgaaagtgtggctcgcgcccttttggaggcaggtggcggcgagctcgctgacctgggcgctgctaaggcgcgcggctaagaaccggcaacgggaaactattttcggagggcgacaatggcgtttacagtggcactgaccgccgcggcaacgcgcccacttacgaaaaagctgcaggtggaattgcctgacttccgggtagttggcgctccggttacccgttctctcccggtttcacccccgcaacttcccgtctgcctgcagcgtttaaagcacggggaatatagctgggtggttattacttctgcccgcactgtcacctatttacaagaactgttagctaccgaaccgcctctaaccacctttccccaggtagcagcggtaggtaaggctagtgcccaggccgcgagcaaggccggttggaatgtcgccttgcaggcgggcggcaatgctaccgatttagcacgccgctttgcggacttatcccccagcacttcctcccctggtcggatatttttaccgggatcggcgctaagcaaacccgatttaacagcagctttaagtgagcagggctaccagatcgatgtttgccccctctacaccatgaccccggtttccgcgtgtccggaagtatatttccaagccgatgcggtggcggttacttctggctctaacctgcgcgccctcactgactttggggtgtttagttccgatgccactgactctggccgcgccctcccccgcctagtttgcattggggagccttctgcgcaggtagcaaaggatttagggctagcagttaccgcggtagctaagactccggatgcaggcgggctggctgcggcgctacgttcctgcctcgaacgataactgcggattgaagcagctgacagtttaggtgtgaaattttggttaacgtttataaaccgttgggtaacgtatgcagaaaacaccttaactagcggcattagctagaccacaactgttaaaataaagcatgagttatacaccccagcctaatagtgaaaaccccgttccccaaggttccccgataccgcaaagcccccagttttcaccggtaaacccgcaaatacccgcctcacccatgccgccggctgtacctcccaagaagaacaagactggtttgattgtcaccatcgtgattgtggcggtgctagttgtcgcgttggtcgggttatttgtcgctaatgcggtagttgccaaaacccaagaagataatctcaaatccagtttcaccagtgaaggcttttctaaggtgcagacggagatagattcctcccccatgctgattagctactttaaagagtattaccgacacgcgaaggttactgccgctgaaggagaatttaagcaaggatctttcggtaagcagaatgccggtaaaaaggacaagctgaagataaaagattttaagctcgatgcttacggtctcaagggtggggacgatcccctgattgagaaggggaatatatcttttagtatgcctggggaagagctagacaaaatgatgactgaccccaacttaaccatgaaacgtgaaggtaacaagatcaccgccgagggcgatgaggacggactaaggttccaggtcgtgatgcgtatgcagtttgaacccggaaagtcgggagaatctggaaaacttttcctagtccccgacaagttcatgatcaacggtagtgacgagttcatggggcaaaagctaaatcctgctgatatgggaatgaaaaagaaagaaatcccgatggatttgaataaagctttcgtcctcaagaacgtagatttttcgggtaaagacatcaagtttgacattgatttcaagaacgtcaaactgaaagacatcggcaagtaaggattgctgactacccgtttaggcaggtaacagctactgatttccgaagttgcctgcagctgccgcatctgtgaattctccgcacaaaaagcgagcgccagccccggataagggaatttgcgaatgctcttccgtgctgagcggcagacatcttgggcatcgcagctgattatccccgccagtttcgggaaaccgtgccgcgccctcggaaaatatttgcgaaactattcacgcttttgggcgcgaatctcgctaaagtcccttggcgcggtatgctttttttagttttcttatccgcaagccgcatggcttacctaaggaggaacgattgtttaactcccacgaagaagccctaaaatttgttgccgaccagggtatcgaactgattgatatccgtttttgcgatctgattggcaccagtcagcattttacgattcccgccgaccagtttgcggatgccctagaaaacgggttgatgttcgatggttcctctattcgcggtttcacctcgatagataagtcggatatgaagctgataaccgatgtgtctgacgcctatgtggatcccttccgcgcttgccccactttggcggtgaactgttccatcgtggatcctttcaccgatgcgcctttcccgcgtgatcctcgccaggtcgcctctaaagcggaagcctacctgcgctctaccggaatcgccgatacctgctttattggcgccgaagccgagttttatctttttgattcggtgcgttaccaaacccagccttatgacacgtttgtgaaactggattctgttgaaggctactggaacaccggccgggaggaagagggcggaaacctcgcctataagactcctttgaagggcggttacttcccggtggcgccctccgataagttctgtgacctgcgcgattacatggtgaagctgctcagtgactccgggttaaaagtggagcgatcccaccacgaggtcggctccggggggcaacacgagattaactatcgtttcaactcgctgatggcggcgggtgacgacatgatgaagttcaagtacctgattaagaacgccgcgcaagaggcgggagttaccgccacctttatgcccaaaccgatggcgggcgataacggctcggggatgcactcccatttttcgctttggaaagagggcgagccgctgttctatgacgaaaccggttatggttccctctctgacctggctcgttactttattgggggcttgttgcagcatgcgccggcattgctggcgttcactaacccttcggttaactcttatcggcggctggttcccggttttgaggctccaattaacctggtgtattcggcgcgtaaccgttctgcctgtatccggattccggtgactggcacttccccgaaagctaaacgggtggaataccgggttcctgaccctagcgcgaacccttacctgtccttcgcggcttgcctgatggcggggattgacgggattcaaaatcgcctagagccgccagctcccatcgataaggatctctatgagctgccgccagccgaatatcatgacattccgaaactgccttgttctctggatgcagctttagaggcactccgcgctgaccaggacttcttgactgaaggtgaggtatttaccccggacttgattgacacttggattgcctacaaggaacaaaatgaggtggccccgctgcggcaggtggtgcatccttatgaattccagctttactacgatatttaaatctgtttcctaaataaatcccgcccccgcgacctcggaaaatcgcaggcaaaagccattattttttccgaggccgcgggggcggattattactattacaacctttacttttcgtcgcgattagttttagtgatttccactccccacaatacgcagccgattaccccgaaaacgatggaggccatcaccatgattccggcgccaaaggggaaactgctgtcggtgtcgatcacataaagaatcagcgcccctacagccagcaacactacacataggatagtgaatatccaggcaaaaactttcagcatccctctgttcctttcatgctgcccacagctttggttactctagcaaacaccatcggcgaaaagtagtttttctagagatttattatcgtactgccgggaaatttctggccgataactttccctggttctggctaatgcagtacaaagctcacctgctttttcttcgtatctatttctttttatcatctcgacctcggcgtcatcaccagatgcttcttcctcctggctggcaagttgcgctggcgcaccctctttcataaatggagccgcaagtttatcgaactcgtctagacttttacgcagttgcgcattggtttccgctgcctgatagccttcgaggaactctcgaataatgttgagttcttttgaaaaccgcatggctgataagtcgtcgagcgagttcaggtatctgtgttctttattgccggaattcctccaggcggagaaattttccggtttgaaggcaggtaaacgtagctttttctggatgttatcaatccagggtttatacatggtattaaaagcctcgaaagccttatctttgttgagatattccggatacagcaagactttatagtgttttttctgaaactccatggtgccaactaccggttgatagcactgattttcacttccctctaccccgtaaccggcatcggtcgcatctcgcaaagtagaaagtgaacaccagctatacatgggcagatctgctacgtctttcacggcggcgtgttcctgggcatgactcccccacaaataccccgcccccactgaagttatgcaggttaaaacgccagctaaaacaaccgcccccaccttcttattgatcttcattttgcaaccccctcgtgatatttgaagtgacactttcatgtttccaaaggtcaaatgggtaattcaatggtcaagtggctggatattagcgccaggtggccaggattaatatccgggtggctactcggtggttacatttttcaccggggtgcttgctgccggctggtttgcagctatagtggcgtcgaaacgtatattctaaaaaacaacgaggaggtggccgtgagcgaacaagaaatcactatcgggttggttgatgacgatccctttgcactgcaagcattggcagcaattttgaatagtacccccaattgtgcagtctcctgggcaacctccaatcctgaacaagcccgcgaatcctgtcaccgcgatcccgtagacctggtgttacttgactacctcttaggcgagaccaccggggacataatctgcaagcagatcacccagcaaaacccgcagcaaaaagtggtgattatttctagcctggaagtggcagatgtagcccgcaccgccctgctcgcccgtgcgcggggattcctaaataaagccgatgtcttaaaagacttgcccagtttcctctcggtaatcatgcaagactccgtggtggtctcccacgcggtagtacagggattgttccaaagtatccctgccccctctcaaattgctctcaccgagcgggagcaagcagtttcagagctaattttgcagggaatgtctaaccgcgagatcgcagagaaaatgagttactccctatccacggtgaaagaaactgtaactgcgctactggaaaaaacccacacttcctcgcgaacagcagcagtggctgtcctggtgcaagacggagcagtcagctacccaaataaccttccctaaggttggggtaacgaggacgcgacaatagctgaagtctacctagtcgctaccaacctcaagctgtaataggttctgccactggtcagcacgtttaccataggtgagcaggccgccgatctccagcatccgtttactggccagccctaaccccatcttcgaagaatccactgtcctgccccggatctgattcttggtttctaggcggaagctattttcataaatccgcgcattgacagttactggatgcttaggatcgccatagcggaaaatattttcaaaaagttctgccaccacctgcgccactgtgcgctgctgctgccgagaacactcaatttctccagttttttcacactggtaggaaaccgggaatccctgcttcttaagctgggctaccgccttagagagcacctccgttaagctctgggtcaccacctcggtcttttccggcaaggttttttccgaattgatgagggcgcggatagcctgcgatatttctgcggcctcgtgcgcggcagtgtccctaaactcctctaaaggtaacaagtcccgctggctttgttccgcagcgagtgcaatatgtgtgcagtgccgtaaaacattatcgtggaggcgaacattaaggtcccgccgctccgcctcgcgggcttcctgttcttcgcgtcctacctgaaaagaacgatccatccaggtttttactaaaatcccggcaatcgagaaacaggccacatccgaaaaagcacttaccgcttcgaaatctaccgggtttgcccagacgaaaaagaaaaagacattaattaccgtaggaatcaatactgctggccctaagcgcttgggggaaaaagaaaaagtatctaagagggcaatattggaggcggggaaaatcggtgcccaataaatctcatctcccccaattaatgcgaccgaggtgagggcgtaacctacccagaaaacggggaaacgtatcgctaatatggccatgactaaagcctcaatcgccagcaggtatccgatgtcaaattcttgggttaatatcccgtcatacagcaagaacagacagttaaaaaccgcgaccgtgataatgatggctcgaagtaataaaaccttacgtgcgaacttcttccctaaagtttgccgatcaaaatataaatacgagcccagaaccttaaataccgcatccacaggaaaatcatactgagaatcgcccggtagctggaaggcttagggtttattaccgaatatttcgccgctttttctctgagtatctgggggattaaaaccagattcggcaggtggaagcgatcgctgcgagcgctctttcggaaagcggcaggcaggtgggttaaaatcattgcagatacctaggagaaaaaatgactgatgaccttttgctgacaccaactattcgtcctcgccgcctgcgggctttccccgcgatgcgcaacctgattgccgaaacccgggtgagtcccgcccagctgatgctgcccgcgtttgtgcgggacgggattgaggaagcggtagagattccctctctaccaggggttttccagcatacagtggagtcgattcgcgaactggccgccgagtgcgtacaggccggggtgggcgggatcatgttattcgggattcccaatactgctgataaggacgcgcagggcagccccgcctgggatcccaacgggattttgaatcgcggtatccgtgcggtgcgcgaagaagtaggaaatgacctggtagtgggggcagacacctgcctggatgagttcaccagccacggacattgcggggtagtcaccgccgacggtcaagtcgataatgacgccaccttgccgctatatgcgaaaatggcgctcagtcaggcgcgcgccggagcccatatggtagcgccttccgggatgatggacggccagatcgcggtgattcgcgaggcgcttgacgacgccggattcaccgacaccgtgattttggcttactctgcgaaatacgcctccgctttctttggtcctttccgggatgcggttgcctgctctctagagggcgatcggcgctcttaccagcaagatccccgtaaccgccgggagggcgtatttgaaacccagctagatttaaccgagggcgccgatatggtgatggttaaacctgccggttactatctggatgtactggccgatgtggcggaaatgtccccggttccagtcgcggcctaccaggtcagcggggaatacgccatgttagaggcagcagccgctaatgggtggattgaccgcgagcgcgccattgacgaatccttgcacgcgattgtgcgtgccggagccgatatggtgctcacctattgggcgctagagtacgcacagcaagacaactaagctgctcaatgcctgattctttccgcctgcttgcagtttccgaggtggcacatgccgctaactgtcagtggcggctttggtgctacctcaccggtaatactgagctggaagcctccgatgtttttcaccgctatatcggggatttaactagcggcgaggatgaaaaactagcggcgaagtatcgggcgtccgggagaattttccaaactgagctggaattaaccgccgaagatctgaacggaaccctgccgtttttggtttacgaggacgattcttgggtgctgcaaatggtgcgcttttccgcccatgcccgccaagactcggtgaacctccttgccggatatgcgcatctggctcggcataatcaggagttattaaacgcagattttcccgctttagcggcaaaactcgccccttacgcccaagtgttgctggctgatggcaagaccatagacttttctctggatgaactggaagagctgtgggaacccatttatgcccaggcacaggaaatggcggctgaccaggatttacttgccgctacccccgaggagacttggcgcgccctcgacacggtttgcggtagttgctcccattgccgttgggcactggagcgttacgatgatcccctgctgatcagcggggtaggtcccggactgcgcagggaattgcgagccgaaaatattttcactgccagcggttttgctgccaatcctcctaggggatatagcccggagttaatccggcaagcccagttgcaggtggcgcaacatccaggagaactactgctagaaactaatccgctggctccggcgctaatggctcttcccgaacctcacccgggggatgtgtatttagattttgagaacgactccctgtggggttggaccctaaaagatcacaccgggctgatttacctaggcggaatagtctgctgcgatgaagattcttggggtgaacagaaaactttaactccggcgctaccggttcgtggccaagaatcgctaccggcagcagacaccctaaacgtggcggaggaagtaggggaactatctaagcgtatcggcggaaaatatcggaggttttgggcgcataatcgcagccaggaacgccagctgctgattgatttactcgattttttgcgccagcgtttccgccagttcccgcaaatgcatatctaccattattccccgcaagaacgcctctacctgcaacgtctctcttctcgccacggcctattagcaggtgaagtgcgctacctactggctgcgggcggccccatgcgggacctgcagcaagtggtgcaatcagctattcgcactggtcaaggcggatattcccttaaagagatggaaccgttctatatggggtcttggatgcgctcagaagacctggataacggcgcggattcggtaatcgtctatgacgcactctcgcgagcaggcgccctcgatccgggagccgagcttagcgttgatgctgccgagcagctacggctcctcgccctctataacgagtatgactgctgttcaaccgcacttttgcaccactggttaatcgctcaacgccgccgcccgcgcctgagggccaagctggatcccgccgccctaaccaccaaataaactacgccctggccccacccgctccgcgttaagctgtgcttttcgctaaagaaaaattattgctagctctacttttgtccccgccatcctcatgggaaaataggggtatgaatgataatcaaccccaatccggtaacttcgaaaatcagcagcttcccgggatccagactggatcccccaacccctcttacccgcaatacgcttctcagagtgactcctcgtcctattcgacgccgctgccgaaccagcctatgcctaacgcttctagcagcgtcagtgcagatgagcggactatggcgattctggctcatttagcagcactaatcgccatggtagtttctgccggttggcttacctttgtaggccccctcatcgtttggtttatttataaagataaaagtcctttcgtgcgtaacgcggccgcgggcgcctttaactttaacttggcgatgactatcacttccgtggtggcttggatactttgcttcaccatcattttgatacccctgtccatcatcgcgtttatcgttattttcgtgatgaccctggtgtgttcgattaaaggcgccgttaaagcctccgataaagagttttaccactaccccttcgggattaacctgctggactagcttgctgggaaccgctcctagatttttgtgacctagcatacttacggaacgatatccctggtaagaggattttctcttcccattttttccagttttcagattttttctgtccctgacccaggaatctttcagcccggatagaaaagctaacatttgtttatttgggttacctaagttgtgcttgggttgttttgaaaggatctggacttgtccttcgtgggaagagcttggcgatacgtcgttagaaaaccagttagaactattgttatcttcgcagtgctcactttagtggccaccgttttgatgtcggcggatgccatcgagagggcgagcgcccgcgagagcgcgaaggtagaggccaaggcgggagccggcttcgtcctaggaaataatccccagttcaatcagggaaccccgcggggagctggaactgttaaacctgcagatatcgcccaaatagcgcacctacccgaggttaaaagctatgtggctaggcaaaacgtgaccgctgatttggttggtgcccagactcagaaactgggaaccaatgactatgacgccaaaaaggaagcccaatttggcaatgcggtgaacgtgtggggagtaaaccgtaccgatatcgacaataatttccgttctggggcgttaaccttggtggcgggacggcatttaaagcctggcgatcaccataaggcaatcatccacgaagatttggcgaaagctaatggcctgaaaatcggcagcaagctgaaactcaaaggtaatccttatgacgtcgataatttgcgaaagtccactgcggaaaccgaaatggaaatcgtgggattggtgcgcggctccaatactcggcaggcagcgcaacgcagcgagctgtttgccaataccgtttacacggatttggatactacccgcgccctctaccagatgggcaaagacaacgagatttaccaggatgctaactttttcgttgcttccgaaaaggatttagagcaggtagaaaagaaagccggttccctcaagattgattggcgcaactaccaactatcgcccgccacccaatatttagcagggattaccggggcgcttagcgggataaattccctgatgagcaccactaagattgcagcgtttggttttgcgctgttgattttaacgctggtgttgttcctatggatgaatgaacgcaagaaagaaacgggggtactactttcggtcggcacctccaaggccagtattttcgcgcagtacctgtgtgaactggtgattaccgcgatccctgcgtttgtgttggcgttctttatttctggagcagtcgcgcaatggctgggcaattccgcattggcctcggtcaatagttcactaatgcaagaattggctcaggccgggcaggcaggcgccgatatggaatcttcggcggcgactaagaccctggacgcgttagcagtttcgctagctacgccttcggtgattactgccgtgttactaactctgctggtaggcgtgctttgcgtattggcggcgtccttcccgatgctgcgccgcccgccgcgtgccctcttggtggatatcaaatgaggtcgcttagtatttggcggcgcgcctggtattcactcatccgtcgcccgcgccgcgccttgctgctcatgctaataatggcggtggtttttaccgcgctggtttcccagtcaggggtgcgcgcgcaggtggccgggatttccggggcaattaactccggggtgaacgcgggattcactgcccacagcaatagtggcactatctctttagcgcaagcagaaaagctgaaccgcttgccacaggtgaaacgctcggctttcgaaaaagaaactttggctaagccggagggcgcgcagctggtaactaccgcttccggggtgcaacttgacggcgagttcgcgggtgatgccgggattatcgggacaactaatagtcatttgcatccgtcttttatgggtaggctgtaccggctagaaagtggcacacatttgacagccagcaaacgaggcgccctgattcaccgcgagtttgctgagcgcaatggtttacgtgttggcagccagctacgcctgaacgccaagggaaatgcagtaaaagtgccggtagtaggggttttcagcggaaaaactgagaatctgggaggactacccgccggggcttccgagaatcagatttttacggacctaaaaagcagtcaactcttgggagggaaagaactgaccaccgctaggtactttaccggggacgccaccgagttaccggcggctttgcgcggggctaaacagacggattcggagctgaatttcgaatctaatgcctcccaatttgcgggggtgctggctaccctttcgggggtgaataagctgctcaccgggctggctgtgggagtcggtggagccgggctagccgccctcgccctgataatgatcttttggatccgcggacgcacccgcgagatcggggtgctgctggctgtaggaaaaaccaaagcgaatatcttggggcaactcgccctagaggccgctttcttggcgctaataggcagcgctatcggagcggtcctgggatttctgctgtcagggaaggtatctgccctggtctttgccaagtccgccagcccgtctttatccgccctgtctgcgagcgggagcgccgggagtatcctggccgccctcgtcctcggatatgtgattacttttgtggcgctacttttagcgaccgttcccctgcttcgtcaaaccccgcgagctattctcgcaaaaattagttaggaaagattatgagtattttgcagttagaccaccttgaatatgtgtatccgggaaccagcacccagatcctgtcggacgtgtgcaccgagttcgagaccgggaagttctatgcgattgtaggtgcctcaggagccggcaaatccaccctgttgaacctgctggccggattggataaacccacctccggggcagtgcgctttgatggtaccgatattgcggagactggctatgctcagcaccgcaaaaagcagatttcgctggttttccaaaactataatctgattgattatttgacgccactagagaacttgcggctggtgaatgggaaagccgggattgatactttgacccagctggggctgtctgaaaaggaggcgcggcgcagcgttatggcgctttcggggggtcagcagcagcgggtagctatcggcagggcgctagtgtcgggggctccgattattttggcggatgaacctactgggaacctggatgaggataccgcccgcgaagtaatcgagatcttgcagcgggccgctcatgaacagggcaaatgcgtgatcgtggtgacccattcgcgccaacttgcccgcagcgccgacgttacgttacgcctaaatcgccgcaagctagtggtggcttaatctcccaatagtcccgcgtaagcgtgccggagcttcgcggtataccgaaacctggaaaacaatgctgttaaagttacgaaggagcaagactttactattgggttaagagcgctagctgcgaaaagaaacacgctgcacgcgaggaagtgatcaaaagtgacgaaggggttatttgtaggtctcgcaacgctcgatgtgatccagttagtggaaaagctcccggcagaaaatgaaaaaatcagagccctcgatttcgcgtttgccgcagggggacctgccacgaatgctgcggtggctttcgcacacggatattcacagttaggacaaggcttagaaaatagcgacgatgcggttctagtaacccggatatcaaatgatcgcattggtgacctgattcgcgaagacctcgaaaaacagcatgtctgcgttaaggcatccgcactacctggaaacacgtcctcgaccgtggccacaattttagtaactaaatcaactggcgatagagcggtagtatctgctactgaccagcgaaagatcgcccctgctgttagcgcgattgctatcgaggtcgaggatttcaacattgtggaaaccgatggttacgaaaccgatctcaccctagaggtactaaagcgtgcccaaaatgcaggagtaaccacggttttagatggagggagcgttaaaagctatacccaggaacttttaccttttatcgatgttgccattgtttcggagccatttgccgcaggtcgcagctccagcaaacttttcgactatctagcaaaatttggggtcaaatattcagcgattactcgaggtagcaaagagatcctctattcggcggatggagttaccggaacagtgaaaccccgccagacaacagccgtagacactcttggtgccggggacttcttccatggaggtttcgtaaaagccctgggcaggcaagagcttactgttgatactttcttagatgcgctttccaaagcgagccggatcgcggctttatcgattcaatccttcggcacccgtaattggttggaaggaaactagcttttttctgccgaaatatcgaaaagtaatctgattagcgcgtctgcctcggacttggttgtttcaacaatatctttattgggagaatcaacttcatttacccatttgaccgcgagttttcgagagcgtcccccagccatttgcctgtcaataagtctatctttcagtaaagaagtatcagtatctaaataccagaggatatctagcatttctttaacatattcccaaccgccattatttgcggccagataattcccttcagtgacaacaacctgagtgtctggcttgatctcgatagcagccgcaatcggctcgtgcagcgagcgcgagtaggtaggggcaaagagcgaatagtttacctttgcccgcaaccgttgcagcaagtctaggtatccgttcacatcaaaggtttcgggcgcacctttacgatctagaagctgcttttgccgcaatatctcatttgaaaaatgaaatccatccataggcaaatatgcactaggaatgtttaaaacctccgctaaataatcaacgagtttttgcgttaacgtggatttcccagagccgggaggacccgctataccgacaatattgcgacctgggcgtaactgacggcacaactctcgtgcgagactatccaagcattcaaattcgtaaatcttcactcaatatcctcctaaaataaattttactgctttggttgccgcccgaaagtggagttagttcgctcaacgcatttttggggattagaatagtcggacttagctaactttgtatagcaacgaacgtagtgtctatcaaagaatcttggatcatccgggtgtttttctatacaggaggacgcaaagccatagcggatcaccacatcaagattacttatttttcttctggtatttccgtaaggtttcttccaatgttttagtgatttcttcccgcagctccggcggggaaagcacttctacagaaccggcatactgcaatgcccaccacaccatggcatttggttgagccctcacatgtactcggtagcagtcactgtcaccatcgggcacaacctgtgcatctgggaaccaagaaaaagtgccgtcaagcccgccggttaccctatatatgacgtcaaccgcctgcccgctaaaaaagtaaggtcgctcatttacgtacctaacgaaatcaaaatcttcgctatccacgctgtccgcagtgccctctaaaatcttgatatcgctgatcctatcgataacgaaatgaaatatccgggtattttcgttcgggtgcggatcttcgcccgcaagcaggtagtagtcccctcttttaaaaaccgtggtgtagggatagaactcgtactttttcccggattctttcaaaacagcctggtctctgagcctgctagattctgatcgctgtttttttccccgtcgagatcgctgattcggagaccagtatttccctggcgcctggcgcccctctgcctctggccgcaacgccacgtggctataggagaagcgaattttgtaccccccactcacagcgctatcaagctcaagcagagtagctggcaccccgctgaacatggggcgatctgggaaaagtatttgcccgctttcgaggtgttctggctttacacccgccagtgatgccagtaggctgcgcaagtcggcgacatcatccgggtaaaatcgtgacatctgcagcgcatcggcaagcactcgcatttgggcagggctaataatggcggtggcaaaccagtcggtgcgccttccccctggaggcaccgggatttcgtcctttaaatccttgaactgttgaacccgaattccgaacggcaaccggtcctcccaagacccaaggtgactcagatattcgcgcgcggttctctccgagatttcaggagggttccattccagatccccgctggcgaagtcttgggccaggctgagcgccgtcactccctgatcaggactggtattttccagcaaatactttaaaatagcgagcgcgtaaccgcgttgcgtctttgcctgagactttttggattcgctgttacccatagaccaaggctagttcattcccgctaaaaccggaagagtttttccgtattacccgcaggattcttctggtttgccggccgccgattacgggagacaaaaaataggtgctttccagataggtgccctagggtttgcgaagacctgccagcggcatcggaatatgagcctagccgcgacaaacagccaactaacgcagtagctgggaaaaaagtttaagtaggactaaactgcctagatcagttcggccaccttaacggcaagctcttcatcaatttttccataaacctgatctaaggaagcacccaaatctgccttagccagcagttcttctccagatacggtcacgacttgatccgcaaattttgaaagttctgcatgtgccgctgccgctttctgggcacgtttttcaccctcgaaaggaatgggcatggacaccacggcagaaaccttggctcccaattctttgccgatttcggctacaaaaggtgccgcgctagagccggtaaatccccccatccctgcgagtactacgatagcgctggtgccgttgagcgcatcgcgaatctcacccgcatgcaagctaaggacttcttgccagcgatcatcgtcaacctcggaatctccctcaatatcgaggctggttaacgcaatcttttcttgagcctgcgcctgatctaggctgtcctgcggccgattcagggcaatggttcgcaccgaggttcccgttgccgcgacttccttcgcaaacttgtgagtgaaaacgtcgagaacggtagtacccattcccccgatgccaacaactgcggttaccttgcccatgactcctccaaaaagctagctgcgactaatgttttcctagcttacaaactccggaaataatacggcagatttcttccgttttactgtttttgacttaccattaagtagtacccagtccccatagcctgatagcaggaaatctcttgttcgtcaccgcaaaaaccgcgaacagtattagtttcccagtaaaatagcaccaaggagaaaaccatgttttacgcgatgagtgacatacatggatacttggacgccctggaagcagcgctgaagcgtattcccgatttggaggcaaccctaactggcgaccccgaatcacacaggctgatttttcttggtgattatgttgatcaagggccccatagccgcgaagtattacaacgcatttacgacctacaaactacctacccagacaatgtagtggtcatcaaggggaatcatgacgaatggcttatcgacttcctgactacccgggactgcctggcgacaaccacctatatccccgagactctactgagctttttagacggggtagaccgcgaagcggtaaaaaccgaactcgcagacagggatcccgagacagccctgcaggcgatccgcgaccagattcacgcccaatatcctcagctggtgcgctggctgaaaaacttgccgagctattggaaaaccccaacccaggtgtttgttcacgccggaatcgacgaggacgcgcaggaatactgggagctgggaacttccgaagacatcatgctaaacaaattccccgccactaccggaccgttcctgatagatattattgccggtcacatcggaacctacgctttagcaagtgaccaaaatttccatgacatctactttgacggattctcgcattactttatcgacggcaccgtcggagtatccgtccgcatcccagttctaacctatgaccccactaccggccgctacggatcggtctagcagacccgacggcataagaatccgaaatctccagtgccagcaacacttcgtgttgcgccaacgaagtggagctagcgggactcggcggtgctacgcaccagcaaggattttcggagctgttctggggatacacagcctccgagaattaatcccacctacattcccactcgaatagtgaagcgtctgtaagtcttggggtggctggtctgggattggctggcaggattggtattggccgataccgatttcgagaagactcgcgcaataacaccgcacgtcgtgttcaaccaatacggggcgaacagtcagcaaattggttcagtcggcacacttaacattggcaggaggttgtgatgccagaaggacagatcgcacccgtagagccagcgccgccaaacgcaatggttctcaatcagctcgggtcaaacggtattcagattgctcacgcaggtaccatcaacgcccctatccacatcatggtgccaacacccctcgggactgcgggaacacctgccatccaggttgctttaagtagcgactactaccagctgatcgtaactccagattttgctccgaacgcccgatcggtccctatggatcatcagcgcgccttgattgaaaacatgtgccccacaaatcgcgagcagctgaacaaactcgacaaagacgtcattgagatgctgaagacctaccccgcgctcatcatgaacgagaacgacgacttttgtaaggccagcacggagcaggtcgcttattttgctgcggtcacgaacatccgcaacggtgtacgcggaatcaaaattgaatacgtcccgttaacagaaatcccgcaacaacgcatcaacgacctcctcgaagaacttgacctatccggcaacgacaaattcaacgagctcaaccgcacccactgggccgtcaagaacgtcaatctcatctatgaactagccaaagctggaattagcgtactagctccaaccttcgtccaaagctaggctcagcacgagacagcgcgaactagatagacgttcgcgcgatgcgtcccctaacttaggctaactactgagggcgcgcacccatctggtgacctcctgtgagtctggtcagaatgtggcgaaagatacatcagctatagtatgcttaggtaaggctaacctaatctactggaggtgtaatgctgaatcctaaaatcgatttagatggaatgaacaagtacatctacgacagcgaatggtcagacttatggcagacctatttttctgagcgtccaactacgcaagcgactgccgacttcctagcttctttaattcctgggggtcgagccttggagatcggaatcggcagtggccgtgtagcaattccactagctgcacgcggcgtcaaagtcaccggaattgacacttctgttcacatgcttaaatatcttgaaaaaaatgataccgaatgctcagttgaagcaattcaaggcgacgctcaaagtttcgacttagctaccaaagatttcgatcttgtatattttgtttcctggggactgcacatgttactgaccgatgaggctcaacaggcttgtttcgatagggcatctcttcatttgaagaagggaggctattttgtcatcgaactaatgtgttcagaaggctatcctttcggtgactcagacattaaagcacttaaaattgataaaggttcggttattgctgcaggtgaaatacataatcctacacagcgtctactattgaatgcttatcttatttttaacgatggggaagcgcccagagttcacacttcggcatcacattactgtactgctgatcagttggacataatggcgtctaatagcggactagaactatatcacgcttacgagtcatgggatagagctccgattattgaggattcacctacgatgattcgagtttaccggaagtgccgcgatgactaaccaagcatttcctccaagatcagggctagacgtgtccatggttgatacagagatagaagtccagaatggatattggacattctctaatggagtcgcaaattcttttgtaagtcacgtccgcaaatctgtgcctttgtacgacgagggacatttcatggcagccgagttggccagttgctttttgcttccaaaaggaaaagcctacgagctcggtgtttccactggtgaactcattaaaaagctagcccgtcataatcctcgaacacgatcggtaaaatggataggtctcgactgcgagagcgaaatgattgcaaaagctcgcgaacactgtgccgggatagacaatattgagttgatagaagcgaacttagaagactttgagtttgataaatgcgattttgtcgttgattttctaacaacacagtttttgaatcgctccgcgaaacgtgcattatttaggaaaatatacgaaagcctgcgagagggcggagcattttttacgtactcgaaaatacttcagcaggatgccttttttcaagaacttgcactgctactttactcacgatttaaaacctttaacgggttgagtgccgaacaggtcgtaacaaaatctgaaagtgtttacggtgttattaaacccgaatctaccgtttccatgattgaattgttgcacgatgtaggatttgagaaagtaactcccgctattagatacataaatttcgaggggttcttagcggtaaagtgattacgagctgttcatcggaagatgaactgtttaatttccccatcgtacacttcgatggcttctactccgtagacatcagagatcagttctgtagacagtgtgtttgccggacaaccctggcaagctattgagccatgcttcatgacgataacttcgtcgcagtatcgtgccacaaggttcaggtcgtgcaggacaatgactgctgtaggtgcgacttcacgtacgagagcaagaacctgatgctggtatttcacatctaggtgattagttggttcatccagaagcatacatggacattgttgagttaaagctctagcgattaggacacgttggcgttccccgcctgaaagtgttgtgaaatacctgtttttgacattactcataccgactctttgtagtgcttggctggcaagttcatagtcggtatctgagtagccttggaaatcggtgcggtgaggagctcgtcccaaaaggacgaactcctccacacgcatccggtcagtgtcatgctcaaattgcgataccacagatattttcttgccaatctgcgatgctcgcattttatgtaatggttttccttcgagtgcaattgttcctgtgctaaggggttgcgctccaaatagggagcgcagtagtgttgttttccctgagccgttgggtcctgctataccgagaatatttccaggctttacttgaaatgaaatctggttaatggctgtgtaggagccaaattttacggttgcttctgtcacagtcaaaggaaaatcgttcacggtttctcctatttgcggatttgatctgcgagttcaatggtgccgtatagtgctgtgggcgaagcataggcaattgcagactcagcaaagaaaatctggttgttcttcacagccttcatgtctttgtatccagggattttctccaaacgcgccatggttgattctttagttgccccgcccattcccaggaggacgataatcatatctgggtcggacttgacaaaagcttcttccgcaattgggccttgatggggatgatagtttggatcgatagcagactttagatccaaagtttttgaaatttctcccatgacccctttggttccgtaactgtagagtccttcgtcttcaccgtagtagtaggcgtaagagacgctgcgaccttgtcctggcttttctttagctatttggtctattttggatttaagatcatcagttgtttgcttggctttttcttgtgttcctaacaagttcccaattgtcgttatttcacctagaatcgcattgaatgactcattttctttttgatcagggtagaagtagtgacattctggtgcgtcaacgattgcgggaattttcttttctagtactgcatctggggatagcccgcctgattcaaaacctccgccatatactaagtctggctttttggagataagagcttccatggaaattggttcttggattgcctcaattttatcaaccttaccagccatccaggccgcaggttcttcaccccattcgtttgctcgcaaaatcaccttgtcttctgcccctgctgcagcaaggtatgcaagtccagtgacgccaagtgagacaacccttgatggactggtagcaaaagtctgttctttgccgcagttagtcactgtaatccctttggactgatttgacgatgatgatgtctgacctgacggcgctgatgagcatgcagataaccccatagccaggcatacaaccgaggtcatcagtgtagtcagttttttactttgtcgcattgtttctcctttggttattgtgcgttcttcttgattaaagccatcaacatcggcgtgcccactaaggccgtgaggattccgatgggtagttctgctggacgaataattagacgggcacacaaatctgccacgacaacgagaagtccgccagaaaacatagccacgggtagcgtatttctagtagttgatccaacaagcaatctggcaagatgaggaatgactaacccaataaacccgattgctccagttatcgagacgagaactgcaacagtaaaagctatgattgaaatgagtaaagcccggtaaatgcgagggtttgtacccaaggatcttgcacaatcgtccccgagatttagcacatcaacgcgacgccccataagaaagaacaatacgaaggcaagtgttgtacaaatggtcgctatccatacgtcattccatgatgctgaggtgagcgaaccgagcatccagaacacaacagactttgccccagcagcgtttttggccgttaccgtgattagactcgtgagcgctgagaaaaaatagttaacagccataccagcgaaaataatccgtgctggagtgatacgccctccagcactagcaaggaaaccgacacaaaccatagcaagaagcgctccgagaaaagccccaactgtgacaccaagtgaagcaagaaatacgtgagaacttcctaaaacaatgacaagagcagctccagttgatgctccagatgagatacctaaaatgtaagggtcacccaatggattcctcaatagtgactgggtgataagcccacacatagccagcccagctcctgttgcaaatcccagcaaaacacgcggcaaacgaatttccgtgataacttgttgatccgctccgtcaacagtgccacccaacatgtcatgaatagcctgtactaccaaagaaactgaaatatcagtagcgccaaaagaaatgccaaacactatgcagacgcagaccaatgcaagaagtgcgattaagagcagagaacgttgtagccgagtacctaacactttatctcacttcctcaacgcgcatgagaacctgcgagggcaggctcgcagaacagcttgttcgttttacctgcctgcgtggtgagatagtcccaaaactgatcagaatgctcttgtcgaacttgactagatacggcaccttgatgtgttcctggtgacgaataacggtagtaggttactgcggctaggtttgctcggagtttttcaactagcaaatcggcgtgagagacaggtgtcacctcatcgtctacgtaagctgagatgaaccaagcggtgtcttttaaagaaccgttgatcgaaactgcgatcggatcttcttttttcataaatgcttcccaatctgacactctggaatcgccatattcggtaatccatttatggctgagatcgtcgatatgaatattgcgcgtatttgctatgggtactcggcacaagtaattgcttgcaaggctgggagaatgcattgcagtagatgcaacaacaagtgctccatgagacataccatgtaagaatgtttgctgtggtgtgcagactttttgatcctgtagggtgtggatagcgctctcaacgtcataacgcactagcgcacgtccctgaaggcgtgcttgctcatgccaagcagttccatactctgcaccgcctcgggtatggatgagcgctatattgaatccttggtcaagccatcggcttgcaatctgtgaggaaaagaaacttgtgttggatttaccaaaccctccatagacatgaacaaatgtagggctacattgctcaagctcgccataacagtcaactgggatacgtgtcccgtcagtagataccgagttgatgcggcggtgtttcacgcttacggaaaaaggatatggtgtggatgaaatctcggttaagctgccatctgcctcaatagcgaattgcacttccgggagcaggaaagacgacaccctcatgacccagccatgtatcgaatcttccacgggttcgatagagcaacctggcgggaagaactccccagcttgataggttcgcacgccacggtcgtctaggatcgcaatcgcgcagttagcgtcaatccatcccccatatatttcccgttttttctctcgaatccgccaagagacaaacatggtaaaaccgtgcgacacccggatggacccacgtacccgaactggtccgaccacgcgcggactagttcgggtacgtgttgcatcaggttgtttgctggagtcgtttcggttcttcatctaagtgaggttgttcgggagtaacttctgtcatatcatgtacttagggtagcctaccctaagtacatgattagaggcaagtctgtctctcactccacaaccagaaaggaggcgatgatggaaaatctcgtcattgtcgaagttcaagaggaatccaccgaccaaatcacggttcctcactgccatcacgctcggactacgagcaccatcgcgtggtcgtaaccgcataaggcctggcgctggcgttggtcatctcgccactggtgcgagatgccagcgtcagaccagctatgaaatcaattgaaagactggaatggaaagccaactgctcggtatttgtgccgaactaagagttttagatcaatctcgaaccctgttaacctgcgccgatgggactcagcttatacttcaagctgatgctgtatccctcgctgaagttttcgataaagcaaaaggacgctgtacaagtgaagttctcggaactcctttgtactcagcgctcgctaaacacacttcactgaaaaaaccaccgacagcagcaagcaaaatgaccgtaccgaaagcacatggtccgatagacgttctcgtttgcggagatgagtcattcggaaaggctctagtgctcgcactactgaacaaaggggttaaatgtgcctattcggatcgaaatcccagagaatgctcctatgaggtgtttcatgggggttttctagtcgtatgcagatccactcaatcgcggatgctgttcgattccgaattgcaggcactcaacgaatcaaatgtatcttggatccccatcgattatgaagggtgttcacttcgagtaggaccagtcgttgtcgaaggtcgcggcgcgaactacagcgactgcctggcacgggaacgcgcaaactctataaacgaggaggtttttgccgcgtccttgcaacctgcattacgtgggcgctttctcgaatttatcacgcagtctcctacgttgatagaagaatgtgccgaattggttagccatatctgctctgatgaacaagtcgatcaaaatcagagttccgtttttgataccgtctgggaagttaaaccgaactccgatctcctcatccatcccgtacttccaatcaattttgttaatccgccggataaactgagaccagttcatccccccacgtttcttgtagaccgactctatggtgtcgtaagagaattaactacggttagacattcgtccctcatgcctccgactttggtaacaacacaggctcgaactactgatttatcaaaaatgtctggttacgttaataccgtgttttgtcaaggctcaagtgttgcgccttcgcaagtgagcgaaaatgagatcgagattgttcgtgaccagaacttttacgctgcgattggagagtcggtggaacgatactgttctaatctaattgatctcaaaccagtacaatacgccagttataacgaactaatcagacgtgggtttccggcgttggaccctcgcgaactggtgcttttctcatcaaagcagtatgaaaccaccgggtttcccttccaacctctgactgccgatgtgagaattggctgggtcgaaggacgatatttagatgatgacagtgcagtctatgtcccagcatcgcttgtttatgtcaactggcatatacggcaaaatcggcatcagccgcgtattaattttccggcgtttgcaggtgtggctgccgggataaccgaagaacaagctatcctttctggtttgagcgaggtaatagaacggcatgccactatggtgtggtggcttaataaacagccactgccacacgttagacttagccaggcacagctttcgttattcgaaggggctcaagaaaatctgcgcccggcgctgattcatttagataacacgttcaatgttcctgtggcggcaggtgtagttcataacgacacatccaagctggttcacgttgggttttcctgtcggtccacgttagccgaagccgcattgaaagcgtggagtgaggcgctcactctccaagaaggagcgcacgacttgaaaaaccccaacggtattcactggtcggctatacgagacggactgttaccaggacgatcctataaggcatggcgtgaggacaggcgctacttagacgactttcgtccagatctcaaagatgttgatgatttattagtccagcaggaagtttttcttgacccaagagcggtagatcgcgttgcacccttgcttgatgttacgccagcaagagatcctcagacagtaaatgaactgccggattcttccttgaagacatatttagagatagttcgcaatcgcggcaaacgtgtcattgtagttgacattacttcaccagatgcagcatcgtgcggattgaaagtcattaggacgctggtaccgggaactgttggcaacacgccagctgcattcccttatcttggtaacggcgttgtggtcaatgaggccgtcacactggggtggcgtgaaaagcctctggacgaagaatgcattaataatttcccgatgccgcacgcttagacgtggtgtcgttatagaaggagaaggatgtttacccaacaacgacgcgttatggcagcggcagggctgacggtatggctgttgattccgcctattgtgataggaatggttgtgtctgccctgtacgtggcagctgcctggttgaacgcaagcctgtttaccgaactgctggggctgcgacgcttttcagtgattgtcccccttatcgccgtgattgccgttttgcttgtagtacggcctttaattgatgtgtgcggccagttagtacaaaatcgggcgggtttggtggtgaagggcaatcttcgccgttcgttgctcaaagaactggatcgtcaaggtccgatgcgggtggggcttggccgctcagggaatcttcagtctgttatcactgacggtgtggaagctatcgagccttattttgtcaagtatttcacccagttggctgtcacggctatgacggctttggttttgactattaccttggcccgcgtgagcgtgtggatagcgctcgtgttgctggtctgcggcgttgccgtagtagcgattcccagattatgggataaagcattggctgaacgcgggcagtcccattgggctgcgtatgagacattaaatgccgatttcattgacgcaatgatgggcatggctactttgaagtcatttggcgctgccgattcctatggcgacaggttaaatcggcagtctcgtgagctgttgacctctaccttgggtcagcttcgtctttccttgggcgagacagggttgagtgggatgatgaaagtacttggccctgcattagctttgctcatagcgattgcccaggtgcgcaccggcagtatggaacttgggcaattgttctttgtaacgttgctatccgttgaaatgttccggccgtttaaccagctttcatcgtgttggcatgagtcatttttcggtatctcagctttgccgtcaatgaatgagcttttcacccggatcccgccagacgataaggagtctgaccagcctgagcacggtcaggtaattgagacagtatctaaccctagtttggggatagtttttgataacgtcacctacacatatttgggaagcagcaagccggcgattgagcagatgagcttcgatattgaaacgggtaaaacgacatcgattgtgggattgtctgggtctggtaaatcaactgcattggggctgctgattggctatgatcagcctgccaatggcgatatcaaggtgtttgggttacagccatcggttgatgaggtaaccaagctggtgacccttgttccgcaagagccgattattttccccggcactatccgcgagattttactgagtgccaatcctcaggctagtgaggccgacatgatgaaggctttgactattgctcacgcagataacttacacgtcgaatgtgatggcgacttagacgacaatcgtttggcagagcagcgaccttcgcattgccttcgctcggattcggttgctgacagtgttttggatgtagagatttttgaacatgcgaaaaacctgtcgggtggacaaaaacagcgtctcgctatcgcaagagcgttaattcgcggtacacagattttgattttggacgaatcaacatcagcgcttgatacctatacagagcatcaactgctaagtgaattgagagctgcctatcctgaactaactcttgtggtggtgacgcaccggatagatacggcagcgaaatctgacaaagtcgtggttttggcgcatcgtcaggtgagctgtacaggtgcccctagtgaattagcgaaagatcctggctcggcatggtctgagctagtagcggcacagaaaggagaaaactagtatggctcagactctttcgcacatggtgcggttgatgcgcagactgcgtgaatgcctgccgttgtttgtagcttctaccgttgtgacagcgttggctcagatcactctggttggggttaccgtgacatcggtgtggatctcaacccagttcctaagagatgtgaatacccagatatccggtctagtcggacttttattaggcctggttgcggctcatgggttgacaactttacttgaagtgtggtggtcgcatgaggttgcttaccggattttgcatacattccgggttcacatttaccaagcaattaagcgaatcgctccggtcggcttagctggtaggcgcaccggtgatgtggcctcagcagctatggatgatgctgagaaacttgaatggttttatgcccataccgcctcaaccattatttgcgcaattgttagcccatcgattttcattgcatttttatgctggctaatcggtccagttgggttggttatggtgttcccagtggtaaccatgatcagcctgcctcttttgctgttacctattcagcaaaagcaagggagcgcactaaggcatgctctggttgatttgcggatcgctgtgctcgattcaatccaggggcaacgagagttacgttctctaggaatggtcgccaagcagcatactattattgacggtttgacgcggcgagtacagcaagtaatgaaccgtcaggctctgcgacgggcttgggaaggggcatatgccggaatctcgacgtctgcttgttcgacgcttctgttgattattctcaccggtcgagtactcgatggagagcttgatggtgccttgttgccagttgctgttgttttggcagggatgagcactgcgccagctcttactctggttggaatgctgggtaagtttggggaactcggtgcctgtgctgggcggattaatgagatttttgatgctaaagaccctatcccgagcgagccgattgaggttgaggaacactctggtgaggcagggtcactggtagcgtcggaagtgtctttcgcttatgaggatcacacggtgctaaaagacgtttctgttgccgtgcgcccagaatgctcgatagcgattgttggagcctcaggtgccggtaaaaccacattcgctaatctggtaatgcgtttccttgatcctgaccagggggtaatgcgatttgacggggttgatctgcgtggccgccagcctgatacctaccggcaagagctggcgctgatccctcaggattgtcatattttcgctggatctatccgtaataatctggcgctggctcgccctgaagccagcgatgacgacatgtggcaggcactccaagcggcacaaattgggaatcttgttgaatctctgggtggtttagatgctcgagttggtgatcgaggagcaaccttatctggaggagagcggcaacggattggtatcgctagagcaattttgcgtaaccctgagttgttgattcttgatgaaccattggcgaatatcgacccgttcctcgaagctcaaatcgcggctcacgtgaagcagttacgttcgggacgtgccacgatagtcatcgctcaccggcttgcttctatccgaattgctgacagcatcgtggttcttgatgctggaaagattgttgctcacgggactcacgacgagctgatcagtaatgatgtttaccgcaaactgttaggagatcagataccggcaaagtagttgaaaacgctagggcaagaataggggtcttgttctagcgtttcaaaagaaatgaggggtgagaggtgcatttgtgtgcaattctcatccccttttttcctgattagggctacgcacagcaatgatagcgcaagattgatgacaccgaagacgaataccgttcagagcgtaactggctaatatctcaacagcgtgcgcgatacctctcaactcccgtgaaacaagacgtgaattcttcaccgtcaactagaaagtcgagcgactacaaccaacgtagttctacaaccacgccccttgcccacacaccgggcacgaagaaatattcatccccatacaatgcccggcccaatttcaatgcagactttcccgcgctacaaagccgcaaaaccccgctcatagcaacattttctgtccgaccttcaagttaccccaaccaacttgaaccacgagctttccccaccacaccaacgaaaagcccccacaaaagcaacaagaatgtcctataacccgcaaccaccgacgaaaagcctaaacaatttgacgagcgccgatactttttgacggagtgccatacgttttgacgccctcggagtcgtgacactcgagatcgccttcctgaccccagattcgacactcaggagacccctaaccaccatctcctgcacccactcagcaggccaacccttccccacaaacccactctgacaagccaaaccaccgcccatccgggcacaacaaaaggacgctcactttgtatcaaaatgagcgtcctagtggtggagctagcgggactcggcggtgctacgcaccagcaagggttttcggagcacagcctccgaaaaccactggcgcgggcgaacgctcaacccgcgttcgctacctccccgcgccagccctcacgggttcgaatccccttagctccacaaaccgccccggccaaccccgcgttggtcggggctttttcttattttaacctccctaacctgcgctgatagcccgctggcggggtggaaaccgaaaggcacggacggacaaagaaagacaaaaaaggactaaaacgggtagaatctagtggtacttaagtggtactcgagtgggactcgttttggtggtgatgatcttgagcaagcggcgtggctttggttcggtaaagactcgggagctgaaatcgggcgcgcgctcgtacctggcttcttttattaacccggatacgggtaaaagagtttcgcgttctttccgctcgaagatggaagcgaacgcttggctaggggagcggcgccgcgatatccgttctggggagttccgctccccagatgatcataacgagttggttactttcgctcacgccacccaagaacatttacagcgcctaaagaccgctggacgtaaaggctctaccctctatacctattcctcgaagctgcgctaccccctggacaaactaggggataaggatttaggggagctttcctgtaacgatatcgaagcctattgcctgcagacctctaaggatctaaagccgggcgcagccgctaacgccttgaacgtaacccgcgcggtactgcgatgggcagcaaaacgcggatacatggacgcctctgagctgaaccgggttacctggccagtattcgacccagtaaaagaccccgagcgccgccaagtagcaacccccgaggaagtcaaggaactggcggctgagatgcctgagcggctacgcctagcagtcctactgggcgcctggtgctctatgcgcatgggggaggtttgcggcctgcagcgcggcgatttcactaacctagataacccagcgctggcaacggtgcgtattgttcggcagaccaattcgaaaatgggcggggctttaacagacctgaaaaccaaagcggggcgccgcgagatatctattccgcccgccctcgtcccggtaatcaaacaacacctgtccacctgggtggcaaaagaccccacggctcccgtattccccagaaccaccgacccggctacgccggtacatcacaacacgattcgtagcgcattcgagcgcgctcgcgaacagctaggcatggaatggttcgtgttccacgatctgcgccataccgggcttacgatttttgcccagcagggcgcaacgctcgcggaactgctcgagcgcggcgggcatgtggatgtggaggttgcgctgcattatcagcacgcaaccatggagcgtgaccgggcgctaactgcccgcatggattcgcgtatagaggtttaggtgtggtgaaggcgcctgcgctgtttgctgggtattctagggattagcgacaagatgtaataaggcgtgacgctatgaagtaaggagaggaagtggcaggcaatggcgagcggtggcattttcccaatgaggcagacgctgagggtgaacatcttcccaacctacggtctggagaactggaacagggagatagaccaagcggcgatgcagtcgcgggagcggctggaagcgacctacagccaagcgcgggcacagtcagcgcttcagcagcttctattgaatcgcttgaaaatattgcaggagaagcgctgatgcaggatcttaagaagggagcggcgcgtctggggattttctcggtgttcgacctgaggggcaaacacacttacgcagcgtttcaaaatcttctcccagctccccgggtggtgtcaccattgtcgatgtggaaccgggcggcgagcatgagccagagcgccaatagatcactcagcaaacttaatagaagttaggcgtagccgatttctaaaaatttagggaaatatgtgggtaaatactgttactagtagatggatatcatgttatacttaaagggtgttcaggagaacacgttgattgataactaaaaaggggtgatgcctatgaggctagccgattgggtgatgtcagccttaatgcttgcaagcctaaccctgcaaggggtggcgatatggcagcagcgcaaaccacaaaaacgcggtaagcaccgcaagggctgacaaacaaaggtgaggggttcaaaataatcgaactatcttgaacccctcaccgcctagcatctcatgacttacccctggaaaggaatattatggtgacccgaaacatgaccgtatcggcgctctcgctgctgataatcgctctagcaacacggataaccggtttacgctggtacacctggctattcatagcagcatggatagcccttaccgccatcggataccggcaggacaaagcccgtgactaaacaaccaaaacgctacctatccgcgctggacgtggcagaaagaatcgggataaaacgcggaaccctgtactcttaccgcgcaaagaatatgctcccacccccggatgtgatcgttggaaccactactaacgctactcacggctggctacccaaaacgatagatgactggaacgctgctcgcccgtcccgctcgcggacaagtcaatgaaagatagtagagtctgagtatggcaagaacaatcgcagcaatagacctgttctgcggggcagggggacttagcttagggctaagacaatccggtattaacgttcttgccggttatgacctagatccggcttgccgttacccctactcccataacattaacgccgatttcttcctctctgatgtcaaagacgtctcaggaaaccatctacaacaactctggaacaagcaccctcaagatgtcagactactcgcgggttgtgctccttgtcagcccttttcgactatgcgtaagcgtgggcagggaggcagctctgacccgcgttggcgattgttggaagagtttgagcgtctcgcgttagagacgttaccagagtttgtgactatggagaatgttccaggtctgagcgcctcgcctgtgttctctgcgtttattgctgggctggaaaaggcgggctatcacgtttcttacagcgttattgacttgcgtaggcttggtttggcgcaatctcggcggcgtctggtcttgatggcttctcgccttggagctgtatctgttccagagggtgacttagaacagggaaactacacaagtgttgcggatgtaatcggaggtttaacccctattgatgcagggggtactgatggtcatgaccccttgcatcggtcagcgcgtttgtctgcgcttaatttgcgtcgtatccaggcttcaatcccgggaggtacttggagggattgggaagataaaaagctattggctgcctgtcataagaagagttcggggaaattttatgcgagcgtgtatgggcgaatgcgttgggatgaaccggctcccactattactacgcagttttttaattacgggactggaaggtttgggcatccctcgcaagatcgggctttgagtttacgggagggtgcgttgcttcagggctttccgcaggggtacagttttgctcccggagagatggcggcaacggatcagatagggcgccttattggaaatgcggttcccccggtactgggcaaggcggttggtgaggcttttcaggcgtcactgcttgctgtttaggtattcttggttctctaggtaatcgttgaatatgtccaatattgcgtacaggtattcatcgatgattctaaaagtgtcatttagatccttttcggtgcggttagctcctagttctttgaagcttacttcgccgtgtgttaatcgattgcggtcattttttagtcccgtaaggcattcctgtgcgtgggtgagcgctttttgttctgtgtagtgttcgtggattttcttatcaaattttaaacccagatggttacagattttatcgattgcttcgtggtctatatttccgctgtccttcattaggaatttgacgtattttgcaggtgggaagctgctttccggggggatagcttcgccatccagataggccgataggcgttgaatctttgtggtgaacttagccagatgttttagcttgggcatggaatctgctgtttgtgcggctagaaagcggcgttgtatcgattggttgaggttctcggtgcggacttgatcctttttaactttacggattacagctctaagtgcttccgttattgtggcttcaatccaggtgtattccatgaccagggttgctgcccgctgagtaaccagtggttgggggttagggggtgttgtcttgccaagtttggtgattatatcgagagcctcgcttatttcgtttctgcgttcgtgaaacacgttatacgcgatttccattaggcatcactgcctaggaggaagtccttaactgtattaatccttcctagaagtcttgatttagcgttggctccatcggcgcgcacgacttccttgaactggcggctttccaagaagtctgcaatatcttgtgaatctcggattatttctctgcctgagtttaatgccagggcgctgccaattgctatcgcttcgaacctgctattgggggtgaagtttccgtcaggttttcgcctaaacccatacgggaacgcctggtctatatactccatagtgtttgtgaaggtttcccgcatctgcttttctatatctgggttcttcgtcaaagcgaggttcatgcgttctgtgtaggtgtatatgaaatcttgtactcggtcgcgataatcggataagtcgtattggaacgcgaagaatcttgctaccaactcttcacggcgcccctgattggctaatcttttcgacattggagacatggaaaccaaaggttctgtttgcgcaagctcttgaactaaggactggaacgggccgctcaaagcgcctttacgaacttcaggaggcttggctacctcagcagaggtgttaatacggtcgaacagatccgcaagtgtctccgaatccccatcctccaaaataatgctacgcagcgaatagttcttgagcttgcgctgcctgggcacagacagagaactaaagcgcaacccctcgcccgccgtaataactttcataggaccaagaactaactggtcatgtagaaaatcccgaatagtacgcaaacgctgcgaaccatcaacaatttccaacaacccagtttctctgtccaaagataagaacaagaacggaaccggaatccctaacaacaacgactctataaaccgagttttcgtactatcatcccaaatatcctttcgttgataatccgggataacaatctctccgttctctaacttgtccgagtaatactccagcgtgtactccgaaacatagtaagaaagacgagattctccctcgatgatctgttgttctacttcttctagctgctggttttctaccgaatccttaaccattaccattccaatctcttaaatcacgcgaagggctctagttcttccaagtcctcgctgactttcctgctcttaccgcgaccaaaatcagggcgcgcaacattatcgacacccgaaacatcccccgaagccgcgccatccgaccccggagcactcgcggacggggtagccccggctattagcgcttctgcttgtgttattactgcgctggcagtggtggctacgcattcggcaagtttcgcgatttcacctaccgatgccgcacgttccccgcgaagaataatccctacccggttctgactaatccccgtagccgtagctaacctttgctggctaagccccttcttcttcgctcgctctcgcagtagcgcactgcacgccttgtctaggccgtctacgggtttaggtttacgagccatagcgccaatcctcaaccattaccattccaatcactcaaatcacgcaaagggctctagttcttccaagtcctcacgggcaaccctgctgttactgcgaccaaaatcaagccgcgcaacattcccaacaccaaaagcacccgctccctgcctggctcccgaaccacttactcccggagcgctcgcggacggagcagatccagatattcgtgcttctgcctctgctaccacttgggacggacgcaaagatagcgcagttgccatacgcacaatctcgtcaacgttaatcgttggcccctcgttgcgaaaaatgattcctactcggttcaaagacattccagcagctttagctatcgcccgataggacaatcccatgaggctggtctgttcttgcaacactgcagcaacgcttcgacctagatcttcaacaggttttttccgggcagacatacggtaatcatactaaaaacggggacacgacccgccgctaacttgacaacgtaccgaagtcggttcattatggggtcatgaacaagttgaaccgaagccggtacaaggggtttgaggtcgttctttcaggtgaaataagggcagaaatggctcgacaaaataaaacggtcagttccttagccgatgaaatgaaatatcgtcgcgcaacactctctgccaaactcaacaatcacacccccttctccggagcagaactcggaaaaatagcccaatgcttaaatataacagcttccgaactcatgcgccgcgcagaagaagcagtcgctcccgcctgccctaccgcttccagcttgcgccacccgcagcaccccgaaacctcccccgaagccgccccatccgaccccggagcactcgcggatgaggctgaggcgggtatgtggcaggcggtgctggatcacaaggcgcgttgcgctgcttgtgacacgctgctgcaggcgcaaacgcatctaaccgagttagcgcttaccgaggaggagcgttatcttcagcatcttcgccgtctggctcgcgccgatgctacttcaaggactatggagtacgcatcatgagtgaccaatgttttgtctactgccttgactgcaggcaattctataccggaacgtgcgatgaaaagggtatttatcagcgtgatttagacgcagagcacaggggtcattcggtgcatgttttcggtgatccttacacctatcaagaaccgatttgcagcacgcttatcactttgatgcgcggtggcgaagtaccaaagctgctagtgacgtttacccatgcggctatcaaactgggttatttagatgatgcgctgcgaatctcgagggaagagggaatccaggcgcaaaaagctagagcccgcgcggctgaaagcagcaggttcgcgaggcggtaccgccatggggtctaagcattgctcatattcttcctccctggcagggacgggcttccaaaacaatatccctgccggggagggctcaacttctatttattcaaaggagaactcgtaaatgattcgcaaccagtttagcggcgagaccgctaaggatttcgctagggaattgcaagacctttaccatgcggggcgggctttaagtgatatttcagctccgatagagctggagaattactctaacgccacgatctactcctggctgcagtccgtatcggcggcgatggcattttttaccctcgcggcgggccccgtttatcggcggattggaaactctgagattccttccggggtgattaaacaagcagcagagttctttggcggtgatgctcatgattcttcctccccagtaggtgatgaaacttccttgtccacttctgatcctactggggagggttctccccaggatcctatctctgcttttatacggaagctgctcggggcgatactcaagaaaattcgggagaggagcaataaatgcttcgcaaccagaccagcggcgagaccgctaaggattctgctaggcagatgcacagcctttatctggcggggtggaagttaagtgacgttgcggccccggtagacgtggaggattaccccaatgccaccgtctacgactggctgcagtccgtatcggatgcagtgacacgcctggtggaggcagctcacccggtgtatcagcgtttgggcgccgcgcaggttccgatgggtgcgctcaagcaggcggcggacgcttgtcgatatatcgaatacgcacagcgcttcggcgttgacgaggacgaggcgcggaaaaaatggggagaggagcaataaatgcttgcggttgtatctgattgtgctactatgtccgcaggtgctgaacacaccgtaacgagcggtctaccgcgatcccgtgagagcggttttttcatatcggcttggcgtaccaagccgggtagcgtcctcgctatacaagaccctccgggggaaagcgggaggcctggctcgttacaggtgttcaagtacccggcgctgacttgctctgaacaagccggtcagcgtcctcgaacgaacttaacgagctttttggaggacgctatggagcgttatacgggtgtttcttgctcccggttggtaaagttcccgcttacccgaggcgattgcccggcgtgcgcgggtacgcatccagcagggcatgagtggcactgcccggtgctttcttatttggtttctgattttttggctcccggcgcgcggctttctatcgcgcaggtggggttggtgctcgatgcggtggcgtctttcgtggccgcgatggctaccgacacccccaccggtgacggcgccactgctggcggtgttgatggtgacggtgttatcagtgagggggtggcgtagatgcgttacctcgatgatgaactacgtgaccagcttagtgatgaagcggtggtgccttatcggacgggtgcttctttgagtatcgtgtccgctgcttctcgcctggcgggagtgatgtctgctgttagtagtgttgctcaggcgtatcacgagaacgttatgcaggaaaccccggctagtgatgctttacaggttttagagctgctgtgtgctcaggttcgggtgtgtaaccgggatttggaaagcgcggtgttatcactcgctataggccacggcaggcctgccgttggtagtgacgttttggccgaactctatgaccaggtacccctgctcaggttgttcgacaccccgccagaaggtggcgaggtcgttaaaaaagctggcgggcgcactcggagacatctctctaggcaagaagcttttcagcgtgattttgcggttcccgttgtaccagaaccgttcgataaggtctccatcgttgacgcagaccatgaagccgcccccagcggtgaaaagccgctcgggagcagtgtcgatgacggcaagcaacagcgggtagctggcgacgtcaatgatgtagtcctccatgagatacctgaaggttgcggtatcgatcataattcttcctccccggtgggtgatgaaactttgtcattcccttctgatcctaccggggagggttctacttcttctggttctggtgagggggtggagtagatgcgttggctaaaagcttattgcgatgaggactgcgaagatggagcttactgccgttcctgtcgcgcgccgcttagagaggcagaccaggtggtctggcagttaggaaacgatgggcgcgtcttgctgcaggaaaataccgtcgtcattgaattcgaggacgggtgtggcctcaccagttatccaacttacgatcgcggcttgtgccgaaggtgcaggggtatccgcatcaaggtaggaaaggtcaaaggtctcggtaactttgcggctcggaaagctaactgtcgttgtgattcttcctccccggtgggtgatggttgtcgttctctttgcaatcctaccggggagggtcttactcgtgaggaacgctgtcagctagccggtgcgtgcttctgcctaatctctgccttgcaggggcaagggagcgttagcagttccggtagcgtccgcgatggctttgaccgatatgcgcagcatcgcgatctgattggcaaggttgccaagcatcttgctctcgggggacagctcagcccagttgctcgtgaattcctcaagcgcgacattccctatctcattagtgaaatctcgtcgcaaagtttcgatgcgttccagcgcatctttgacggtactaagttcattcatgattcttcctcctcagtaggtgatgaaactttgtcattcccttctgatcctaccggggagggttctacttcttctggttctggtgagggggtggagtagatgccgcaagtagctagaaaagaccggttaaacgtcaagcaggcagcagagtatttggggattgacccgcgtactttgcgtcgttaccgccagcaggggcggattcgtacccggcgaacgccggggggtctgccgtggttttcgcgtacggatttggataaggcttatgacaattatgactgtccctttaagggggcagcatgaggcatgatccggtgtttatagcgcgccgctgcggtgtagtggtgcttgctgttgctgcgtggctttacgtgacgttgtttcttatttccccgtctgaggttgcttctcctgcggctaccgcgtgtttttggggaactttcattttgcaggttattggcggggtgttgtgtatgacgcgcagccccgaaaagaacgaggaggggcagtgatggggatattgctgactggtttgtatgtactcatggcagggattgtggttggcgcggtagctcgcgcggtctcgcagtggtgggagattcgctcggaaggaccggcgtattgcactgatattgaggaggcgatttcgcaatgattctttggcttgtgctttcagtaagcgcggtgctgctgttcgcagctgttgcagccactttggtgttggctatccaggatcgcttcgagcagtacggggaggtgcaacaccctgatgattacctccgcgactagagattgcccggttattagtgtggcggttcctctgcttaacggtttgccgttggcgcatgtgcaggcggtagctgctggcgaggcggctaggcaggctagggcgcggcgcctggtgctttctgggcggcgcccggttgatatttcacatgaatcccggcttttccgggtcgagttcgagacgcgcccttatacgggtgtggatgttccggatgtgaaggctatgcgccctaaaacgtttttgaatgggaaggatactgattcatggttaagctgaaatcttccctgcctccaggagagttaaacgggctgtacgatatcgctactgacgcggtttcttaccccagcaggatgcgcctggttgtaggactggtagaggttcctgaggtacgtaagaatatccgtaagggcttcacagagccggttttcgaggttacccatattgagccgttgccgccttgtttgatccggcaaggatacgctctgcttgctcaggctatggagctgcgcctgccgccttcgctttttggtgagaaagagctgcagacgtatttaaagaacttgggggcgggcttagagcgcgatatatcttcccagaccctgcaaggtcaggatgattatcttgacggctcgattgatgaggatacaggggagcttttagaagaaggtgacctggatggcaactgagagtttgtctttggggcgtgattattgggttactgctaatgcccggtttaacccgatggtgcgggcgcgcaaagttaagcatctgcgttcgtgtggctattggctgggttgccagttccgtaataagcatgggctgaaaaaagtccctagattgcgtatggaggttacggttacgaatcctccccgcgggggctgtagggatgtggcgaactatcatcccacggttaaagcaatcctcgacgggatcgtagacgccggggtactagaagacgatgataaccgacatttggaaggaccgttcctgcgtcctggtgtcggtcactctgaacataggggggtggcttcgtttgagatagcgcttacccctattgattaattcttccttagttcacttttcgaggtacaggtgttttttcaagttgatgatcagctccaggtgaacccgaaagcgttagccttggccaggcggacactttccggggacttaatggggccggctgctcttggggtgtggctcatggccggatctgcagtccaagcgcaactgaccgatggtgtgatttcactagagacccttctaggtatcttccttgatcgcgatttcgtggagcgtgctgcgagcctactgtgcgaggtggggttgtggcacgatcctaaccataagtgtgaccgctgcctacctgtcgcaccaggaacgtggcggtatcatgactggttcgatcttggctacgataccggcgaaggtaagaaactagctgaccgtaagaagaaagaactcaaggatcggaatcttatcgattccgtatgggcgcgagaccggataccctctgggcgctctggacgttccgatgttgctctttgccgctattgcggcaagaagctccgtaagaacgttcggcgtggtccggatggttgggaactagaccatgtagatcccaaccgggctatcggcgcccgaaacgtggtggtggcctgtcgtgattgcaacgcgaaaaaaggccgccgcctgcctcaggatgccgggttaaaacttagaaggccccctagtgggcttaaaccggatgacccgtacttgctgctagcaaaaatgagtgtggacagtgtcgctgaacctgaccaaggatcgcccattcacgcccaggacacggcagcagataccgtaccggtttgcgctgtggacagtgtcgctgaacctgaccaaggatcgcccattcacgcgccacgttttaacccggccactgaggaattttccgctcccgaacccgaatccagcgcccccgagagagtgccagaaactagcacccaagaaaatagggtgctaaaaactggcagtcccacctctgatgctgaaaatatattgcagcaggtcagcgcgggttttgtgaatgaggtgtccccgcgcgcacgcctgcgcgcgcgcccgcgcacgcgggcatggcagggttatggcagggaaattacttaccagggtaatacagggactaggcaaggctcaccgcagggtgacactcagggttcactgcagggcgcaccacagggcgccaggcagggcgcagcagggtctgtccagggtgacgctagggttgccgccccgcaggggcagagcacggctaggaagcgccgcagaggacgcaggcgcaccagtggtggcaactgtgaggttgcagagaatctggacgcaggccaagctcccaacgtgcttgtggctggtcgctttggctccccttggcatggatggcacggacctccagcagagccgggaatctcgttttgcgaagaacacgagcagcactggccttgccggttctgccaagaacaagctgaggaagaacatgaaaatagttaatcgaaccgcctggattatcttggcgctggcagtattgatcgcgggatccctgggtgcgctcgcgggttatgcggctggcgctgcaggggtagacgattccccgcagtcagtgtcggtggcttggtgtcagcgtttgcatcgagacggggctgctgtttcttgtgattgggattcgaacgcggtgccagtgcttgcccagcagcttgccttagaagaaaagctatctagtggggatgctacccggcgggctgcgtggctgctggagagggggcgccttggatgtggatgagcgccaggttcggcgggcgcattcctggcttgatgatctagcgaagttgcggggactctatccctcgatgatggagctggctctttcgcgcccgggcgattcctcggggcgccacggtctaggttgcgggcgggggttaccgtttcgggcggggctttggcttgacgaaccttctatggagggggcgaagacttggccagcaatcgaagcagagctatctgcctggtctgattctctttctaggtattgcgctgtgcacactggtgacccgttggcggatctacatgacattatcgaccacatgttcgcagaggaatcagaggatttggaatatctgttgggggatatttcgattgcgtggcaccgggtacataatgtcgtggatccggatgttcctggtcctccttgccctgattgtggggaaaccacgattaagccccagggcgcgaagggctggactgaaacctaccggtgtagggcgtgtgatcgtacttggagtcaggcttcgtggctggccgatgccctgggcaagattcgccggtctacccagttgattactacctcccaggcgtgcgcgctgttcccggggctcacgcgcaggcgtttagatacttggcgttcgcgcgagaagttgttgtctgctgggtttcgggcggggcagtccctttggtgttgccgcgatatttggaatctgttgcgcgtgtctggtggagaaggcgctggttgtggtagtgtggacgctaacggggcatcagtgtctaatcagacaggtggtgccttttgagttttaagaccaaaccaaccgcgcgttatcgccagctccctaagaattggcggcgtatcagggtagaggttattcaacgtgatcatgggcgctgccagatttgcggttcacctggcacggacgttgaccatatcatcaggggacaggatcattccctgtctaatcttcgtctgctttgcagacgctgccacatgcggcgaaccgggagggatggaggaagggttaagtatcggtcgcgggtttgtacgctccgcccgaaagaggctcatcccgggttgaaatctagccccgcccctaaagatttagggggtaggaacccctccccgcccccctcgccatcgcttcgcgtataggcgctaagaaactgtacgggttttagggtcgatatgggtttgacctgcatctatcctctctttttgtttggttttgttcggtttatcggggggtgcaaattggattttttagatgggggtgtttatgggtgctcgcggtcctattccaaagcgtagcgaggctaggcgccgccggaataagccggtgaataaggtgaagtccgctaagggtgctgaagagtttaagattccgggtgaggatcgttcttggcatccgatagcgaagaaactttggcgttatactcgccgttctgggcaggttcggttttatgagccttcggattgggcggttctttattccctgtgtgatgacatctcgtattacaagaaggctaataagcgttctgggcagatgttggcttcgattatgtctgccttgtcctctctgctgcttactgagggtgatagacgccgggttcagattgagttacagcgaggcggtagcgagggcgatgcggaatcgagcgcggttgcggatatggaagcgtggcggcgcaagctctctgggtaggtgagactcgtggcgggtgcacagtcgcaggttttgctgcctcctcgtgaacgaatcgttactttgcccgagggactcccgaagtacacgctgggttatggtgctttggcttggattcaagacaatctgcgtcagcctaacggtccgctcgcggggcgtccttttactcctactcgcggccaggctcggtttctggtttggttttatgcggttgatgaggacgggcgctggctttttaggcgagcggtgcgccgtttagctaaggggtctggtaagtccccgttcgcggcggttatggctctgctggagcttttgggaccggtgcgggtggctgattttgataagcggattccgggcggcgtgataggtaaaccggtgtctatgcctctggtgtgggtagcagcggtttctgaacggcaaaccggggtcactatgcgcatggtgcggggaatggctaataagcgttcccgcctagcccagcgctatgacttagagattggtaaaacctatatcgagaccccctatgggggcaaacttgaacagattacttcttctgcttcctctgctgagggttcggagacttcttttactatcgcggatgaaacggagcactggacaccgggggtgggaggtcttgaccttgaagaaaccctagaccagaacctagctaaaaccgcctctcgtatgttggaaacttcgaatgcgtggctacctggtgcgggttcggttgcggaaaagactttcaatgcctggtgcgagcaggaagagggcaacactattggtaagcagaagattctttatgacgcggtgatagctcccgccaatactgctttaaccgatacccctgatgatggggaaatctcgattactgaggggttggagttcgtttacgaggattgcccctgggtagatatcgagaccattaaagaaaggatctggtctccgtctttccccgtgtcacgttcgcggcgcttttttttgaatcagccgaacgctgccgaagatgcttgggctactttgcaggagtggtcggtgcttgctgaccctgaccgggcgcttgaagacggcgaggacgtggtcctgttctttgacggttcaaagagcaatgaccataccgcgctagttggttgctgcatgaaggacgggttcatattcacgctcggggtatgggagccgttaaagactaccggggtagtggatgtgggcgcggtagatgcgacggttgctagggctttcgacaggtttaatgtggtggctttttccgctgacgttagggagtgggaatcgtttgtgaagaccacttggccagaaaagtacggagagcagctgcttatctgggcgcagcctagggggatgtctgcttctcctatcgcttgggatatgcgttctcacgcttacgagttcgctactgctgctgagatgtgtctagcggaaatccaagacggcttatttgctcatgatggtaactgggatacctcgcgtcatatcggtaactgtaggcgcaaggaatcgcatgggcggatcacagttaagaaagagtccccgaaatctcctaacaagattgacgcggctgtgtgtgttatcggggcgcgcatggtgtatcgcaaagtcctagcttctaaggaatgggaggcacgcagtgattcagggtgggtggtgtatggatgagctttaaatctttactgcagaactgccaggtaataagaggaggtaggaaatactcttcctattacgaaggtgaacaccgcgtggatgccatcggggtttctcttcctcctcaggtgcgcgtcctggaaatagttgctaactggccgcgcctagcggtagatgtgctagtcgaatgcttaagcgtggacggtttcacgctcgcagaagataaaaccgggaaagttactcgcgctctgcagcgtctgtgggcgggcggtgatatggattcgctggcggctatggcgcatacggaggcacttattcaggggcgttctatcttggtggtggagcgctcgcttcaaggcaaggtttttaccagggtgttgccctgggatgcgtgcgttgcgtatgagactgattctgccgggcgggttgttgaagccatgatccggtatcggcgccagggtgaacagtgggcgcaagtattcggcctcgatggttccgcctggttccagttttcaggcggggtatggcgggaagagaaagcctatcgccaaccctttgccggtattactccgtttatcccggtaataaaccggatgcgtccttctgatgaggttgggcgtagcgaaatggatgatgtgattccctttgctgacgctgcttctcgctctttcactaacctgcaggttgcgcaagaactgttgtcgatgccgcaacgctacattctgggcggtaactcgcagaaggttacccgccctgatggttcccaggtttcagaacttgaacagtatctaggccgctatattcacggaccggaaaaggggagcgttgggcagttgccgggcgcggatttaaccccgattatttcggctatcaagatgtatgcgcaaaatgtttcagcggtggctggaatcccgccctctatgttggggattaccaccgataatccctcttctgctgaggctatgcgcgccgctaaggagcgtctggtggctaaagctgagcgtaaacaggcgctgtttggtgacgtgtgggagcagtgggcgcgcattgtgttagggctctgtggaagaccggttagcggacttgagaccttggaaaccatttggcgtgattcggctactccctcccaggcagcgaagaaccaaaccgtgctgcaagcctacgcccaggggttggtgtcagcacctaccgcgcgtgaactattaccgctctcgcccgagcagcgagccagagaacaagtaggacagctagagccagacgatttatatctataaggcggtgccatgaatccttatgaagcactgctgaacgcgataatagctttagcgaaaaaagctattatctgggaaaccagtaaagccatccagcaagcagatggtgacactgagattacccaacggattttagctgaccggctcccgcctatcgtgcgggctttccgccgtcttgcctaccaggcagctatctcccatgtacgctccgagggcatacagcatggggtggatctcgactacactcccggtctcgccctataccctgaaaaagcagtcctagaccctattagacgagcactgcggataaccgaaagcaccgatccagaaactggcgaacccagcaaacaaatcagcgccaaccgctatgacatcagccgtaaattagggaacattctttcgcggcatgtccatagcgcagcccgccaagcagtgcgcagatgcgcaaccgatagcgaagagcaagcagaactatcccggcaactagaccaagaaactgattctactgtgcctgcgcggctcgcgggtggggattccccgcttgatagggctgctgctcgcatgcaggaaactattcttgctgagcgcagggaggcagctgagcaaactggtttaccggttgatgatccccggctgctcaaggagttcgagcggcttaagaaacgggtcgctgatattgatgatttggtggacgatgagcggataaaacgcgaacggcgcgctgattacgataaggaaaccaaaaagcgccttcaatttggtaggccgcgtgcttgggcacgggtgcttaccggggctaggtcttgctggttttgcgtcatgtgtgcttcgcgcggtcctgtttaccagtcagcccagagcgcgggagaaaacaaggagccttggaatagctaccatgatcactgcgattgcaaggtagttcccgtgtttgatcatcgtaactgggaaggcgttgaacagtaccgccagttagagaaaatgtggcgggatgtcacctggaagaaacgtgatggaaagctgcgcccccaggatggcgagatacagcgccagttgatgcaaaagttcctaaagagtgatagcggaaaacagcagttaaacgagatttctaactttaggaacgataaagattatctaacacctaaagtatcgcgaaaagaccttctaaaacctgtaggggaaaaactacggcatgtgcgtcactaccacaaatacaatcctgaccgtaagcccagacccagggtcgagcgggatacgcagtttcgcaagaatttcttgggcaaggaaccgccctcgaatgaagcaattaatgctctagtagaagaaatcctttcaacaggtgaactcgtcgatagtgagggtgttgaaatccatttagcgaagtttgtaggagaaactcaggttacagcggtatggaaatttactgaagaaatgatttggaaattccaaagtgcattcccaactggtggaacaggatattatgaagctataaacggggtctggacgtataggtaagcgaggtgaaacatgactcttaacgatgaagattttctccccagtgaggaagaactagatgaaatctgggacttccttattaagcagtcggagctagacactccgtttgggaaagctgttaaaacagagttgaacagtttacctccagagccgactaccgttttttactgctccctcctggaagcatggtacagacaagccccggttccaaaaagcattatcgagtattaccgaggctttatggacaaagaccaaatagaccacatggatctgagcaaactgattgtcgctgacgaataacagctagtaaacaactaaataaatagatttacccgcatgaccaaaggttatgcgggttttcttatacccaaaagtaaggagaaaacatgtttaagaaccgctgtaagccaaaaccccgcaagaccactaaaccgggtaaacccaagcgccgcgcgcagggtgaagacgaaaacgcagaacctgaaaccgaagcacaagagcaactgagcgaggaagaaaaagacaccgcgccctcggaaaacagcgaagaaccccaagccgaaccggacgagcaggaaacctctaaaactgacgaggacagcgaagaggaaaccccctccgatgacgctaacccgtcctcagaggatgaagctgattctggggaagatacccctgctgaaagcgagcaggaaactgaaccagaacaggacgtgaccgctgaaatcgccaagttgcaaaccgatctggaaaacgcccagaaagcgctcgcggataaggaagcggaactggcgtctttgcaggcggtagagcagacggggaaggtgctctctagcgaggggctacctcgagagttagcgcagtatttaccgtctgatcctgagcgtttagctgaggcggtagagctgcttaaatccctgcaagcccgcccgggtggggagcggattccgcgtcctgattcggttaagggtgagcggggcggtaaggattatgaggctttctttgcctctcttgactaactagcaggccaaactaagaaaggaaaaagattatggctataaaagataacatttttaccctggagggtcagcaaaagtctggcctgcttgccccggaaatggtgggcgagatttttaagaaagtccaggaaagctccgtggttgctcccatgtgtgggaccgttccgatgggggctaatggttcggagtatgtgattgctaccggggaaccggaggcagatattgtcggtgagggaatggccaaaccggtttcgactatcggtttagctaccaaagtggtcaagccggtaaaagcggcggtgattgttccttggtctaaggaggctcgcctagctaacccggcttcggtgttcgacactattcaagaaaaaatgtcggatgcgattcgccgccaggtggattacgcgattttgtatggtaagtccgctaaaacggataaagttatctccggggttgactgtgtaaaccagactactaaccgggtaactttggggactgctaccgcgaaacagggcggtctatctgctgatgtgattagcggatacaccaaggtaatggaagctgatagcggcgattatgatttctccgggtttgtggctgatccacgtctgcgttctacccttcttagcgcggtagatgatttcgggcgtccgctgttccaagctgagcgggtaaacctggcagattcgtggggctctattatgggccttcccaccaagttcggcaaagtagtatctgggcgtatcgctggccacgctggcagtaatgttcgcgctttcggtggcgatttcgctggttctatcaagcttgggtttgttgagaacatcacggtatccatgtcgaatgaggcaactatccagattggttccgaaatggtttcgctatggagtaacaacctcgaagccgctttggtagaagcaatcttcgggtgggttatcgaatctcctaacgctttcgtagcttacgaacaaaaggcagctaccacagctggtagttagcaaacgggagggtaagtaaatggcaatagcaacccctgaggatatcgcggcatcgctactgcgcgaccttaccccctcagagaaaaaatatgccggggtgctgctggatcgggttgaggtcatgatccaggcacggttaaacctcaacctagatgagattacttcccacatgcgggcagctctcatccaggttgaggcagaagccgttgcccgggtataccgaaacccggaaggccgtatccaagaagctgatggccaatactcctatcagctatccaatctcgttgcatcaggaatgttgcaaatcctgccctcagagtgggaactattgggggcaggattcaacctttggaaaactatcccgcccgctctggacgggtatctaaccgccaacgctaaagcccgcccgggtaatgagttcggtttcaacattcgccctgaccgcacctatatcccctgacagggaggaaaagatgagcctgctagagggacgtcaccgcttacaggtacaaaccgcgcgccgtaccggcgtcagcaagtatggtaacgcccaaatcacctataacgacccggtagaagtagccggaaacgtacaagcagtctctagcgaagaaatagcctccctgggaatgcaaaccaaatccgtctatcgcgtcctcgccaggtcttggccgggcgggccttactcgcggattttctgggaggacaaaatgttcgagcagcgcggggaagctaggtggtttactcgttcgcctgctacctatcactgtgaagtgctgatggtggcttctggggtcgagattaagtaggtgggtggttatggcaggcggggtaacggttaataagaccgcctatagggtggccgctaaggtggctggtcaagaccctgagatggatagggtagctgcccgggtggctgctgttgctagtgctgaggctttacggcataaacgttctggtgatctggcgggctctattcgggtgcggcgtggccgcaaagaccgggtgataacgattgatgaccccgaggcgttacatatcgagtatgggcatcttgccgggggtcgtggtaagggcgctaggtgggttccggggctgcacattctttctaaagcggttaagagggtggggtaatggatgttgtagcaacgctggtgagtgttctgcgtgagggtggcttggatgctatggcatcggttgataccgatattgctgtagatactgatccgctagtgatagtggaagaatcagtagctcgcccagtggcctcgttttcgtggcgttgggcgcatcaggtaaatatcgatatccacgcggttaccgctatcgaggctgacccgatagccgtcctcgataatgctttggatatcttgtgggactggttccaggcaggtaaacctgctggcggtgtctgggcgtcacatttggaaataatccagattccttctctggttcctaccgataggctcacggctactcatctgcgacaagcccgcaccgaaatctctctagtcgctcgttcgctggcggtctaggtctgaaaactcaataaaaaagttctgtttatacgtcaccggccaggtggcgtttttcttttgaaaggaaaaaataatggcaaatcaaaaatatgtggatacggatcatttgctcgtacctggtcgaggcactgtgctgttcgctgagccggggcaagcgatgtttaaactggagggtttcgataaggctaagccagatagctttgcgtcttggaatctgttgggcggtacctctaaggagaatatgcccgccttcgataaggatggtggcgatgctacccagttggggatttgggaagaggacgctgtctataccacttatgaagcaacctctatgtcggttactttgaatgcggtacgtatcgataaggaaactttcgagcttgccttcccgggcggtgtctgggatgaggcaaccggctcgtacaagattaacggtattggttcagttgagaaggctttagcgattgtcatgtttgatgggcaaaaatgcgcggctttctatatgccacgggtttccctatcggttggtgatatgcctgagctggataacgagaacttcttggaagcccagatttccgggcagattcttaccgaccagacccagcatttacgtttgcaggtgttccgtcctcgcccgttgactgcggctgctcccgcgtcctctgctggggggagtcactaagtatgggtaaggcaaagagtatttcggaacaggcaaccgcgaaagctgaagaaatcaagaaaacgcctttccggcagattcccggggctcatgtgattaaaccgttaaaggatattcgcgcttcggatcgtttgcggtttactgccaaaatcgctgttcttcttgatgaggaaggtaaccagatcggtaacactcaagaagtgctgctggcgattgctgacgcttgcgacttggtggaagaacgcatgtctaccacgccggaagagttccaggagtgggcgggcagcgttgatgatggctccctgattgagttgttgatggcgctttatagcgaattgggggaaggcaaaggctctacgagctgatctgtaccacaggtgatgtggcaggcgatcttagagccttatttgggttcagcccagaggaagtatgggaaccctctgggctgaccttagctacgcagctgattgaccggttagcattcgagccgcgctctatttggcgggcgcgtcagatggaatccgcgcccgcaaaacccgcaagtgcagatgctgcgttgccgttctttgcttgggatgaaaccagtaatgcgctagcgctcatagcggatgagctgcaagcattacgcagccaagtcgcggccatgggtagcgggaagcgtcctcgcaagattactccttatccgcgtcctaccaaacgcaaaaggcacaccccgaaaagcctggatcagatcaattgggatttctttaacttctgatttttttcttttccgggaggtgggtggatggctaataatacggtcggtcgcattagggttaggaccctgccggatacctctaagttcaatgaggatctacgtaaggtattaaaacgcgcgcgggaaaagtttgatttacaaatcccagtagagctaaccctggatggtaaatcggtcattaaggttcgcaaacttatcaacaagctgtccgatatcgaaatagagccggatattgatgttcccactgagcaggtaaagaaagcccgcgaaaaggttgaatctgcgaaaccggagattaagccgcatatttcgtatgaccacgctgaagcggaaaagattaagaagcggcttgaggaaaagttcgacaagataaagtccacgattaacgcgaatctggatgtgggtaaagccatggcgcgtttgaaatggtttacccgtccccggttcgtgtctttagaggtgcgccttaaaggaactaagaaggtagcttctttctttgctgctctctctggtgcgcgggtgttgaaatcgtttggcacctcgataaagaactttgccactaatcttgaccgcactaccccgaagattatggccactgccgccggaatcactgcgttatcttcggttgctctttctgcaacatcggggctgattggaatcggtggggctttagcttcaatcgcgcccgcagctctcgccctgcccggtattctgaccggcgcagccgtaggcgcgaccgcactgttcttagctttgaaggacactgggaaagttctaggtgatctcgccccacagtttaaggcggttcaaagttctgtctcagcttctttctgggcgcaagcagcaatccctatccgctccctagctacctctgtactgcccactctttctgcagggctaaccaaggtaggggctgaatccggtaaaatcgctgccgcgctggcgggcatgttttccgctcaagccaagagcggaatgtttagcagcctgttcaataacgttgctaattccattgcgacagcccgggcaggagtagtcggttttaccggggctttcgccactctcgggttggtaggttcccaatacctaccccagttaggtgcctgggttactaacttggggcaacgttttcaaaactttgtatcccaagcagccgctaacggatccttaaagggctggattgattcagccatacaatcctttaaagacctaggtggcaccctggcgggcatcggcgggatcttctccaaactacatcaagctgcccaagccgcaggagtagggggactagcaggtctacgcactgcgctggaagccataaacaaggttatggattcccccgcattccaaggggctctaacccagattttccaaggagcaggccagggggctagtgcgctcgcgggcgcgcttagcccgttgggagggatgattgaatcattagctcctgcgctttctggtttgctttctggtatgagtagcggggttgctaccgctattactgggattgctcaagcgctatcttctccggggatttctcaggggcttgcggcgcttacttccgggtttcaacagatggttacgaatctgttaccggcgtttaagcccctggcgggggtaatagctgcgcttgctcctgtgattggtcagttagctgccgagattggttcggtgctgactgctgccatccaaggggcagccccggtgattacctcgatgcttgccgctattaggccgctaatcccgattttgggtggtgccttgataggggcgatacgggtactttccccgttgctgcaagcgttgtggccgctaatcgtacctatcgctgccgggtttgcggcgctatcgggggctactgctgcggtaggggtgattactaagattcagaccgggttcgcttccctggttaaaagtttcgatgctatctccaaagttttaactattgctaaaaatgggtttgcggcgttaaacgcggtgctagcggctaacccgatcatcctgatagttgttgctgtggttgcggttattgctggactggtgttgctgtatcaaaagtgcgaatggttcaggaacctggttaatgctgtatgggaggcaatcaagaccgccatcatcacagttatcaacgttattaaaactgttattaccacggttgttaccgcgatagctgcggtttgggggtctatttggaacgggattaaagctgtggcgctggcggtttgggacgggattgttgctggcgtaactgcgtgtattaatactgttcgggctgtgattacagcgatagttaccgggatagctgtgatttggaacgggatttggaccgggataaaaactgttgttatcggcgtgtggacagtgattaaaactgtggtaactacctatattaatgctgttcgggctgtgatttcggcagtgataaacactatccggtctatctggagtggcgggtggaatgcggtcaagtcgattctttcgggcgcttgggcagctatcagaggagcggtcagctcaggaatatctgctgtggtctctgtggttcgctccctgccggggagggctcgcagcgctttaggaagtatcggttcaacgctgctgtctgctggcaagaatcttattaaggggtttattaacggaatcaagaacatgttcggatccgttaaatctaccctgtcgagtttgacctcaaagctgacgtcttggaagggtccgccccggaaagatgcggtgctgctttatggggctggacgtctggtgattgatgggttcaaacggggcctggaatctcaataccgcgcggtgcggcggtctttgaatgggtttaccgggtcgttagatccgcaaatgccaggactgtcgatgtcgcaaccggtgggtcttacctatgatgcgtccagtttcaatcctggcactagcgggtttggtggaaattccgggcgggtatctgaggtgaaacagtatttcccgaatgttattgatccgcgtgctgcagctcttgcagcggctcgcggtttgcttggggttccggtatctacggtgaaaggtggcgcgctgtgaatcatgagaccgactggtttgctcgcgtcaccccgatccagcatcatcaaatcaagataggctctcttgttttcggggtgcgcgacagtgagggcgtggattggttgatccaagatgtcaccgactggtcatcgaccccggtgcattcagaatctgcagatagatcctggagagatggggcatggttagggcgtcaatggattagcgctaaacattttgagattcggctttcattgatagctcgcagctatgacgcggctttctttgagccgcgtgtggacgctattcttaaagagctgcctatccgtaagactttgccgatgctggttagtcgctgggcgtcagagactgcgacttgggtgcgggttgaagaatcggtaaaagtgatcccggttgataggcgccgttgggatatatcgattcaatgtatcgccccggaggggctgcgttatgctgcctcattcgataccggaaacctgctatggcaaacctatcggacgcatctgccgaaatcttctggcgggctaatcattcccttcacggttccgtttactattaggtcgctggtggaatctggggaaatggttttccatgtcgcaggcactgccgctccgctggcgcagatcattattaaaggtcctgcccgtaacccggttattcgtgatgagaaagcagactggcagacctcgttcgcgttgagcctgcgagagaaccagcgcttaacgctagatctttcacggcggacagtaactctaggagaatctgcgtcacggcggggcgccatgcgaggggtctggccatctctattaccgggggagcatcagatttcttggagttcagacgtctattcccctgattcggaattgattatcaagtttgtagaagcatacacgtaggagcattcatggcatcgatagatattattcccccctgggcgctagacgccgggaaagatgataaacctacctacaccgggcgagacttgcgcgacttgctcgcagcggtgttaaaacccggggatagccctgttagtgcgaaaccaggaatcttgcgtggcctcgaagtcaaagacaacggtcaaggggtaactgttgaacccggttattgcgttatttctactatggacgggccgttccttaccggtgtgcgtcacccggttaccctgccgattgccgcgccccacgtttcgttttccaggatcgatttagtcgtagcggtgattgatgattcggcagaatcagaccgaggaatgaacctggaaatagtgcagggttccccggcatctagccccacccctcctcaagctcccgcgaaatctttaactatcgcggaaatagatgtatctccaacggggggactttctgttaccacaggtgagcgcacgctgctggcgggcggttttgagccggggacttccgttttgaaaaacggttcaggagtgtcctctggggtgattgagcggttgagcctaccggggcgggtagtggttttgaatgttgctgttattgcttcaggtgaatctggtcttttagctgataccggtatttctggggtcacccagtttgctttgatgggctctgacactcagatgtggtggtgtgggcttgcaggagatggtttcttaacggtctttggggataccccgaaggccggtgatgctttgtcagggactctagttattactgtcccagaggggtaagtaatgttttttggggcgttcgatattaaaacaggggagctgctatcggagctgcctttatcggtttccggggatcttacccttgctatggcgaccattactacgtgtgatttcgagttgcctacggatgatcctgcgtgtccgaccgattggttagctatcacggatccgtaccgtgtctggatagttgcctggactgacataggggaaatcgtgtggggcgggattattgatacgcgggtgctgaaatcgtcctcgtctgtagtggctatctcgtgtgtttcggctgaggactatctggatcggcgctacactcccacgaagaagttcaataacattgatcagagtgatattgctgcttggctggttagtcaggcagtagtgggtgggattccttttctgattgatgcccccaaatctgggatactgcgcgaccgtgcctattatgcggatgagtccgctaccttgtataagcgtctcaccgagctttccggagtgataaatggtccggaatggtatgtggggatagagtgggcatctcttgagcggaattcgattgttcccgtgttccattgcggtactccacaggtaggaagaatctctagttctcctagcgcggttttcgagctgccgggagggctcttagaggtacagcttgaagaacgggcaaaagtgggggacatggctacccacgtgattgcgataggaggcggggaaggagaagaccgccccatctctgcggctcatattgctgtagaaaaagaaaattccggatacccaagaatagagattcaaaaaacctttgactccgtttcccgccccgaaacgcttaacgcacacgccgccgctatcctaaaccgagtccgtgaaggttctaaaccctttacccttacccagcgcatcggagaataccccgtagtgggaatcgattacggtctgggagacctcgtaaggatagagatagaaactgacacgatttcccaaaaaatggttttacgggtggtgggctgggtgattaacgtgaatggagaggcaatctcgcctattgtggctcagcttggagaatctaacgaccagtaaaaccgccattcgactaaggaaaatgggtagccaatgccgcagctagtacctttaccggtaaatacagacaccctgcgtagagttttccgcgaagccgctaaaccaaataccggcaggaagctatcttccgcaacaatctcccaaggcggaatcaccgtgcgcgataaaggcgtactcgaagtcgctgaaggtggaaacgtaacagtagtcgatggtgacctgatcctggcatcggggatcatacaggcagacatgcttaaggaaaacatcttcccccaagtagtgaccatgccccgaaaaacgctaaccagtctgaacggggcaaaaacgggaacctggggaacaagccccccggcgcttatcgctacagctccgtcttgggcgagcgcagctatcgtattcgccgtcatgaccggatgcctagtcttagatgattatgactctaccccgaacttttatgcgctcgcggccgtgactattgaggggaaccgaaggaatccctctaggtttaaggatgaaaccacgggagatgtttttctaaatgttcctcacgtggtgcaagcgataggtagctttagtggcgtcctgtctgattctcgtacggtgcggattgggtatgcgtatcaaactggagaccctggccatattgttctgcggtcttcttgggtggagctgcaagcattgattatctggatgtaggggggcggcgtggatcaggttcctttaccttctgggattgggcaagcccagcgtaggttgcgtgagattcagtctgccgtggattctacgggggctcgcaccttagaaaatgcttctattaaccaggggactctccgggtaaagcatggcggcaacattgttattagtgatggcggtacgctacgtatcgagtcaggggacttgatattagggcgagggaaaatccgtggtgatgccttagcggaacaatttactgctaaaacctattcgataccgttagaaggggccgctgactccccgaatagttcgtggcggtttatgcgaaaagtggttgtgtccccgcctagttgggcgcagcggacgctgattatcgcctcttggtatgcgtatcaaatcttgcggttaagcgaatctggatctggttatcaagcgcgggctcgtcttgctgcgggcagtaaagagtgcgaatcaagaatgttgcactgggaatacactctcgaagtcggcacaaatgggcgggaacgtgactcggctagtggttttgggattttagagattccaggaaaccaagaattctccttaggtgtacagggctgggctaccacggctaaagcggtgatgcctgtgcaaatggatgctacttgtcttttcactcgaaataattcttgatattggaggtaaatatggtcactgctctttccccgattattcacgcggatttaccgcttgaggaattagttctgccagaattttccggaacatggaggcaaccttcctctgacgcgcatttgaggattttccggcaaggaaaaatggtcttcttcgtaggcgagattgttgccggaagcaacgccactacaaacatatttaaaactccgctcccggaaggctggcgccctaacggcaactattttttccccgtgtattctgcaggaacccacgtgatgtttaagattgacgccgctggaaacttaacctacggctacgggaaagctggtcaatacgattggttccccatgtcatcgatccgatatctagctgaaaactagcctctaactcatgcttgaagccccggtattgttcggggcattttttatacccaaaacaaaagaaaggaatcccctatggcgcctaatgaacctgatgatcctgaggcgatccagattgctaccgtgcctgagttcggtgatggtccagaagactgcgccgaattatcttcccttgagattgggggcgaataatggctacagcatcccaagtgattaatactgctgctaaagaagtcggatactcgcgctggaacgacccgaatccaggcactaaatacgggcgctggtacgccgcgaaaaccggctccccatacttcgggcggtcaggcgtcccgtactgcgctatgttcgtctcctgggtactgagccaagcgggtatgatcccgccgggagggatattcgcctattgccccaccgggctaaacaacgcccgccgcttgggacgtgtacacgataaacgcagcgccgcgcctggtgacatcgtgttctttgattggaataaagatggattagctgatcatgtgggaatcgtaaccgccaacaaaggttcctacatcgagactattgagggtaatacctcatcagggcggcgcggctcccaatccaacgggggcggcgtgtaccgtagggcgcgcgcactctcttgggtgcttgcggttgcgaccccgcaatactccaacgctgctccctcgtaccccgccagtggctcccgaaccgggctagtggttgatgggtgggcaggcctagcgactattcgccgcgcgcagcagatcgccgtgacaccggcagacgggatagtcagcggtcagtggagaggaaataagcaataccactgggcagtagccgccgttagctacagccgtggtggatcaaccctagtccgcaaaatccaatccatcctaggagtcagccctgatggatattgggggagacaaacctctatcgcgatgcagcgaaggctgcacgttacccaggatgggtatttcggacacgcttctgtaaaagcttggcaacaagttctcaacggcggacgactcatttaataccaacagcaaaggaaaaattattatgggaaaacactctcgatactccctcacccctgaacacttggaatggttgactcctgcagttcgaatttggctttatggcgtggtgctagcagtaatcgctctgcttggaggttacgggctaatcaccgacagtgtcgcgcctttatgggtggctctcgcggctgcgctgcttggtcaaggcaccgcgatggcgcacacccccaaaacaagtgcttctcctgggggtggcagtcctagcgatactgttgatcgcttagaaaactaactgcctacttgtcacccgcgcctaccatccttggcgcgggtgactttcctatcctgggagtcaatcttgcatcagacactcttaaataatctcggtgatgccgcgatctcgcttgttatcgcgtgcctagctttttctaccgcatggctacaagccaaaacaaaacggcttgccaaacagaaaatctctttgaaaagccatgcggccaatcttcaagaacatttagaaaaagcccgtactgacaacgagactgtctccgaaattaaagagcaagtaaccaatagtcacggaacgaacttgcgtgcagacctagaccgcgtgttggtagggattgctcgcctggacagacggctcgaccgttttgagacagcacaagacgaagtaaatcgtcaagcgatagcgagcttcgggcggatgttcgaatctacagaaaatatcaggcgatcagccacccaggaacacgagcgcatctggcacgcagttgataaaatacaaacagaacaggcgccacacccccccccacgaaataagtttctagtggaacttttgtggcactaaatcccctattctttgtattatcccaggtaaaagaatcttgtaaaagaatccccttgactcaaaacactgatgccccggcacaaggccggggcatcagtgtttgtggagctagcgggactcgaacccgcgaccctctgcttgcaaagcagatgcgctaccagctgcgccatagccccttcgagccggaaaaccgcttacaggtacttccaaactccaggatcattgcgtaagtcatttgccgcattcagtgcccaggcaataatcaccccgataaacagcagttttaagatctttttcaaatctacctacctggttgattgctgaaacaaacttccctcgcagtgggcctagctgggctcgaaccagcgacctcagtcttatcaggactgcgctctaaccaactgagctataggcccatcgtgtccatcgatgaacaccattgcagattacaacattcctaacccggctttcaaaccctgcctaggtgcgttccgtcacgccccctgccagcttcctcgccgagtacagaatggggtaatactactcgtcggtaagtgccagttttatcccgcccactagggaggttacgaggttatagataaacgccccgactgtagagaacgcagtcattaaaattacgttggaaaccgcgatgatagtgctcatcgccatcacccgcggcaggcgcagataatcaatcattgaagcaatcgaaccggtgggatcaatatcgttaataaaattctccaccgaactaaacacgttcatcgagttcaaaagcaaccagaccagcaaaccagccagcaccatcgcgattccaagcgccaccgacagcaggaaggagaccttcataaccgaccagggatcaatccgggaaaccaccaacgagatttggcggggttgatactcaccaatcttctttgctgaggatgcgctggcggcttccgcctgccccaccttcgtaacagtatcggatttttccggcacctggggaatcgcagagctgctgccacccttcgaatccgccttacgcgcgttttctttttcgccgcccagatcctgtgattcaccctccggggagagatcatcagctacctgctctgagcgagccttatcttgatctttaccatcagttgtcattggtcagcctctcactagagctcggttggttcggtttctaacgcggtcacttcttgattgagttcctcgtcggtagcctcatcgatttcactatcgtctgccttttcattatttaacgccacggccaaaaccgcatcccccttggccgggcgagtgaaaatcactccctgagtgttgcgtcccgtacggggcacttcgtccactcgagaacgctgcactttcccagagtgcataattaccatgacttcatcatcggggttcactatcaaggctcccaccaggccgccgcgctcagccaccaggtttgcaaccttgattccgaggccaccgcgcccttgcacccggtattcttctaccgaagtccgtttcgcgtatccgccctcggtaaccaccaaaaggtcgctgtcgggacggataaccgtcatcgccaacaggtgatccccttcgcggaacttcattccccgcaccccggaagtagcgcggccagtaggacgcaaagcttcgtcggaagctaagaagcgcagcgactgtcccttatgggaaaccaacagcaactcgtcatcactattgaccagttccgcagaaaccacttcatcagcgctaccatcaggcagttctcgcaggttaatcgcgatcaaaccaccggtacgattagaatcatattcggtaaaacgggtctttttcaccaaacccgagcgggtagccaacgccaaatattcggcatcatcataagaactgaacgccaacacctgcgcgattttttcctctggttggaacgccaacaggttcgctacatgctgccctttagagtcacgtcctccctcgggaagttcataagctttcgcccgataaacccgacccttattggtaaagaacgccaaccagtgatgggtggtggtggtaaaaaagtgatccaccacgtcatcttcgcgcagctgcgcccctttaatacctttaccgccgcgcttttggctgcggtattgatccaggcgggtgcgtttcacatagcccgaatgggtaatggtgaccaccacgtcctgttcttcgatcaggtcttccatcgacatttccccggcgaacggcataatcttagtgcgccgctcatcgccgtatttatcgacgatctcgcccagttcggtggaaataattccccgctgccgctcgggacgagccaaaatatcctgtaaatctttcacccgcgcctcgagctcggtgtgctcatccagaatcttttgccgctcgagggcggcgaggcggcgcaactgcaaagccaaaatcgcatccgcctggacttcatccaccccgagcagttccatcagagcgctgcgcgcctcatcaaccgtgggagatttacggatagttgcaatcaccgcgtccaaggcgtccagcgccatcaggtagccttgcaaaatatggaggcgatcctgcgcccgcttgagacggaagttagtgcggcgcacaatcacttccagctggtgactgatccagttagagataaacccatcgatagaaagagtacgcggaaccccatctaccagcgccaacatattggcagggaaggaatcctgcaactgggtgcgcttatagagattatttagaaccaccttgggaaccgcgtcccgtttcagcacaatcaccagacgctgcccggagcggtccgaggattcatcacggatatccgcaatcccctcgatctgtccgtctttaaccaacccggcaatcttggtcgccaggttgtccggatttacttggtagggaagttcggtaactaccagacaaacccgggagttaatttcttccacgttgacgattgcccgctgcacaatcgagccgcgaccggtgcgataggcactttcaatccctttacgtcccaaaatagtggcacccgtggggaaatccggtcccttaatccgctcgatcagggcttccatcagctcttcacgcgaagcctcgggatgcgctaaggcccattgcacgccgtcggcaacttcccgcatattatgaggaggaatccgggtagccatccccaccgcaatcccctccgagccgttaagcagcaggtaggggagccgcgcgggcaaaaccgtgggttcttgagtgcgcccatcatagttgtccataaaatcgacagtgtcttcatcgatgtcgcgcaccatttccatcgacaagggcgccattttacattccgtataacgcggagctgccggccctaggttgcccggggagccaaagttaccttgaccagccaccatcgggtaacgcatcgaccagggctgtactaggcgcgccaaggcatcgtataccgcggcgtcaccgtgggggtggaaatgccccatcacgtcgcccactacgcgcatacatttagaaaatcccgagttggggcggtaaccgccgtcatacatggcatacagaatccgccggtgaaccggcttcaaaccgtcccggacctcgggcagggcgcgccctacgatcacactcatcgcgtagtccaggtaggagcgctgcatctcggtttctaagtcaacctgattgatatgcccctttgcctgaaagagaccggaattattttcgagggcgtctgatgaggaagtattccccgcacccgctccgaaagcctcgccggaatgctggggggtttccggggaatctgcttgttgattttgatcttggttgtctatttcgctcatttttaacccgtcccttaaatatccaagaatcgcacgtcagtggcattgcgctgaatgaaagcgcgccgcgactccacgtcttcgcccattagcatcgaaaaaacttcatccgcgctggccgcctcggataaggtcacctgcttgagcatccgctcttccggattcatagtggtttcccacagttcctgaggattcatctccccgaggcctttgtaacgctgcactccgccctcttttggcaggcgcttgccatcggttttgccgtcctctaaatattcgtcacgttgacgatctgagaacacgaactggtgaggtgcattcgaccatttcagccggtaaagcggggggcaagcaataaatacgtgccctttttcaatcagcggtcgcatatagcggaacagcaaagtcagcagcaaagtggcaatatgctggccgtccacatccgcgtccgccataatcacgatggcgttataacgcagcttggaaatatcgaagtcttcgccaatgccggtaccaaacgcggtaatcaaagactggatttcttgactggagagggcgcgatctaggcgcgctttctctacgtttaggattttcccgcgaatcggcaagattgcctggtgagccgggtcgcgcccctgcacggcagagccccctgccgagtcgccctccacgatatagatttcgcattgggaggcatcgcgggaagaacaatcccgcaatttcccgggcatagacacggactcaagagccgacttacgccgggtagcttcccgggctttacgcgccgcgacccgcgcactcgccgcctgctgggccttcaacaagattgctttcgcatccatgggatgggcatctaaccagtcacccagtttggaataaacctgctgctgcacaaaggtacgagcctcggtgttacccagtttggttttggtttgcccctcgaactgcggctcggtgagtttaaccgagataaccgcggttaaaccttcgcgaatatcgtcaccggtcaggttgtgatccttgtctttgaggatccctttatcgcgggcatatttattcatcaagctggtcagtgccgagcggaaaccttcctcgtgggtgccgccctcggtggtgttaatagtgttcgcgtaggtgtgcaccgattccgaataggcggtggtccactgcaacgcgatttctaggctgatggatgcgtcctcgttaaccgcctcgaaatcgataatctcggggttgatgacctcggatttcttggagtggttaatgaactcaacatagtcgcgcaaaccattttcgtacatgaatgatacttgccggaaaccgggaaccggatcgtcggcggtgccttgcgcatcgccggtaactaaatcgcccgcgtcggtagcctcggggcgttcatcggttaaagtgatccgcagccccctatttaggaacgccatctgttggaagcgctggcgcaatacctcgaaactaaaagtcgtggtctcgaagatttccggatccgggtagaaggtctgttgggtaccggtttcctcggtttcttccccgcgttctagttcggtgaggggatgtccgccgttaccgaaagactgccgccacacgtagccttgccgtttgaccacggtatccatgcggcgagacagggcgtttaccactgaaacccccaccccgtgcagaccgccagaaaccgcgtaaccgcccgaaccaaacttgccacccgcgtgcaagatagtcatcactacctcaaccgtggggcgcttttcggtgggatgcatatccaccgggatcccgcggccgttatcgctgacccgcagacccccatccgcctgaatggcgacttcgatatggtcgcaataaccggccaaggcctcgtcgacggagttgtcgactacctcgtataccaggtgatgcagaccgcgctccccggtagaaccgatatacataccgggacgtttgcgtactgcctcgagtccctctaaaactgtaatgtcgcccgcgccgtattcgtgctggacttgttggtcacccagatcagccacctgctggatctccttggtctagttcgttggccccgagctggatactcccagccgctgggcaccatctgccccagggcattcacgccgaaaatccggcgctcactagctctattctaccgtgaaagcctcaaaaacccacattttacggcttcaccccacttttcgggggaaagtcacttttttactttcggcgcgttaggcgcaaatttttccgaggacgtacctgggactcggaaaggtgcgggtattctcaaaaaatccgggatagcgcttgggaaaaggcgagggcagagcttttggaaaaacgccagcggcattctcgggaagatgggaatagatgggaagacacgggcagttcttagaaaaagacgccagcggtcttcctctaaacacgccggcggagcttctcggaaagcaaacgctacttgggatccatgatccggtagctcagcccgcgcacagtcacgataatcttcggcgagtgcggaccgtaaatatctgagttgtattacttttccaccctgattattcttatctgatttctcagccacctgcactaatagcttgcatttataggtctacccccggaaaactagtaacgaaagagagttttttaggacgctttgctgagcagcgctgacggcagtagttcttgtttggtggttttgatattttatcgaaactcccggagtcagccactcgccctggcaccggccgttttatacggatgacgccgcagaacatcctttaaagaatccctatcaacagcaggaatataggagagaaaataatgaaacttggcaaactagctgccggggcagccgccctcgcactttcgctagcgctcgtgccctccgtggccagcgccgctgaaagcgggttaagcaacgaggatactttcatgatcctgcaagcaaaaaacccagtcagaccgggatactacccagagggagctgcgatttattattacacggccaatttaactgccacgcgggatggaaacccagttgatgctaaacaggttcactacggtgaccaaattgtggtgaccaccggaaaacctgccttggctgacggatctcagcacgattggaaagaaccgttttccaccaagcagaccctaaaaattcacagcggatttacttcgaaccccacccctcccgttggggataagtatctctggcagcccaccggcgttgtaaacacgtcggaagctaagactgttgctcccaccgaggagggcaagtttacttataccgtggactgccagctcaaacccggggagcgcttcgcgttcttagatgcacgctacgacaagaccgtcaatgacacttctccgaccacgtacggttctagttatgatgacgcccagaacgtcgccttgctaagttttacgattaacgacccggagggcgccgcaaaatgcggtaataacaatagtgctaacccggggaataattcccaagccggcaccaacacaaataagacctctacttcgaaagccaacgaagataaacatagtgcgaacagtgataacaatgccaaaaagatcgagcagaagtctgtcaagaaagattccctgcctcccaccggggcaattgctctgctagctactgccttggcaggaacgctagttgctgtaggtggcggtattacctatctgtctcgtcgccgtaaacaacgtttctaagtctctactagattaggtttttgcccggcaggaaaacctgccgggcaaaacttatcttcaggtattatttcggatccatgatccggtagcccagtccccgcacggtcacgataatcttcggtgagtgcgggtcgtcctcaatcttggagcgcagccgtttgacgtgtacgtccaaggttttggggtctccgaaccagttttcgccccacacccgatccataacctgtccgcgtgtaagcacccgctcagggttacgcaaaaaatactccaatagttcgaactcgcgcagcggcagctctttgagctccccgtgcacccgcacttcgtggcggtcgacgtccatggtgacgggtccaatttccagcaggtttcctacttcgggaaggtcctgggtgcggcgtagtactgcggtgatgcgcgccaagagttcgcggaaacgatagggcttggtcacgtagtcatccgcgcccagttccaaaccgattaccacgtcaaccacgtcatctttagccgtcaccatgatgatgggggtatcgtagctttcgcgcacctgccggcaaacctcggtgccgggaatccccggaagcatcaaatccagcaaaaccaggtcgatgtggttgcttttaaccactgaaagcgcctggtcaccatcggctaccccgattacttcgtaaccttcgcgtttaagggaatactccagaggtttacggtaagcttcctcgtcctcaactactaatatggtggtcattcctgttcctttttcagctctatttgggtagcttgcgtatcttgggggttgtgacggggcaaagtaatagtgaaagttgcgccctcccccggtttagagttcacgtggatagaaccgtttagatccgaaaccacgtgtttaacgattgagagccctaagccggttccgccagtggagcgggaacgagccgggtctacgcggtaaaagcgttcaaaaattctgccttggtcttcctcggagattccgatgccatcatcggcaacttcaatcaccacgttatcgtcttcccgcaaggtgacatccacgtgacctccaggattagaatagcgaatcgcattttccagcaggttttgcaaagcagaagtcaatagctccaggtcagcaatgactaaaacctcttccccctgcggaaaatgggtatttaaggtgatattcgcatccttggcggcagttcgcacctggtctagggcatcgttgatggcttcgattgccaacatggaacgtggtttggctggcaggcgcccatcttgcaagcgtgctaaagagatgatttcgtaaaccagtttggtgagccgtcgcgattctttaactagctgagtggaaaaggtttctactgcctgcacatcgtcggcattgtcgtgaatcgtttctgccagcaaagaaatcgctcccaccggggttttcagctcgtgggaagcgttaaccacgaactcacgccgggtggcatcagcttggaggacgcgagtgcgatcctctaacaacaccagggtatgccggggtgagattggagccacccgcaccctaaccgaccaggggacggcggcatcaggatgcaccaaatcgtagtcttcctctacgatccgtcccgcgctgcgcgccttgtcaatctgcgctaaaagctgcgggtactcgattttcccgttatggaaaaggggtactagccgcgccaactgggagatataggcaaaagaattatcgggattgagcactaccgaagcctcgggtagggcgtcaagaatcgtagatagatcctctacttgccagccggaaccatcccaatgtggccggtcgctttggctctccatactcattattttagaggggtcaatctctgagaaactaattgtagggactttgttaaccaactgttaaccctgggtaacggttttttgacaccgtgggctcttaacttctgccacttaccttcgttaccttcgcgcgagccccctatccgaaacgccccgcaatatagttttcggtaactttttcgtgaggggtgaggaagacggattcagtaggcccgatttccaccagtttccccggttggcgcggcccggcgatattaaagaatgcggtctggtcagagatccgcgccgcctgctgcatattgtgagtaacgatcacaatcgtataagtctgtttcaactgagaaatcaggtcttcaatcgccaaagtagagatagggtcaagcgccgaacaaggttcatccatcagcagcacctcgggctttactgcaatcgcccgcgcaatgcacaagcgttgttgctgcccaccagacagggaagcgcccggtttatctagccgatccttaacttcttcccataggttcgcacccttgagggattcttcaacaatctgctcgctctcggatttgctgattttcacccgattcagatgcaagcccgctaacacattgttcttaatcgacatggtagggaaggggttcggacgctggaataccatgccgatcatccgccgcacctccaccgggtcgacctctttgccgtaaaggttatccccgttgagtaggacttcacccgcaatgcgccctccgggagtgacctcatgcatccggttcaaagtgcgcagcaccgtggattttccacaccccgacggcccaatcagggaagttaccgtttgggtttcaatcgtcatatttacgtcctctacggctttgaaatctccgtagtaaacgtctaagtgtttagtttctaaacagattgccattttcttttcctatttgctttgcttcttggagccctgctggtagcgagggcgagttatttatttaccaatcgagagtttcttggctacgaacctggctcccagattcaaaaccaaaaccgcgaataccagcactaaggcggcgccccaggcgcgatccacattgatagtggggttacagttcaccgcgtgggcggcacaagaaaccgtggaggtgtactgctgatagatatagaccggcagggtttccatgcgcccggaaaacacattgttattgattgcatcgaacatgccggcggtaatcagtaagggggcggtttctcccacgattcgtgcaatcgccaccaccaccgaggttactagcccagccgcggaggtgcgcagcaccaccgagatcacggtgcgccatttgggaacccccaaagcataggatgcttcccgcaaatcattaggcaccagccgcaacatttccgctgatgagcgcactaccagcggaatcatcaataccgaaagggcaactgcccccattaagccggaacggtaggccggcccaatcacaatggtgaacaaggcagccgcgaacagaccggcaacgatcgagggtataccggtcatcacgtctaccaaggtagtagtgagtttcgcgaacttagtattgcccgcgtattcggtcaggtagatggctaccagcagccctatcggtaccgaaataaccgctgctaccagggtaatcagtagggtacccaccatcgcgtggtagataccaccggcctccattcctccgtacacgcccttcatagacacgctcaagaaatagggggaaataatcccgataccccgccgaataagttcgtatccgatggaagctaaaatcgccagcaccagcagaccgcacatccacatcgaagccgcaatcgcgttattggtgaatcggcggcggaatgaaagcgctttatcgccacccagtttggcgtgtttaagctctgtattaggctctccgctttctagtttctcctggtacttcagctttcgctccaggattactgcctgcaaagcagaagtattatccgaggtggaaagagccgcaagctgattacttttgcccaggctcatcgccccggtaccggcgggagcttgcccggctttaaccggcgtgtgcccggcgcctatagattgttgctttatttttaggtcgccctgattctgattttcttcactcatttatttccccgaactttccttgcgggctaccatccaacgagcacccgaattgaccagtaacgtcagcacaaacagcactagaccagtgaagattagcgccgccgccatattggaatcggcctccgggaactggagggcgatattagaggcaatcgtagagtgcgctccggctctaaacagcgaccacacataagaggcgccgggcgaaagtaccatcgccacggccatagtttccccgagtgcccgtcctagcccgatcattgctgccgaaaccgtaccggaacgcccaaatggcagaaccacggtttttatcatttcccacttggtggcgcccaacgccagagccgcttccatttcgagagcgggagcgcgggcataaacctcgcggcacagcgcggtaataatcggaatcaccataatcgccagcaccaccgaggctgcaaaaatcacccgcccgattggagatactggccctgaaaataggggaaaccagccaaaataggtggcaaggaattccataatcggttgcaaaataggcagcaatattagtccgccccataggccgtataccactgagggaatcgctaccatcacgtcaatcaatccggcgataatcgccgagattttctggggagcatagaagtttacaaatatcgccagcgccatagaaagcggtaaggcaatcgctaaggcgaccgccgctgccaggactgttccaaaaagctggggcgccacgtactcccagatgctgaccatttcggtgcgtccgcgcatccgcagccgcaaatccgggttagagattgccggccaggcttgcaaagtcaggaacatcgctaccagagctaacactgccgcgataaccactgctgaacctttagtagcaagataaaacaatccatcccagttaaaaattccttttcgggaaagggattgttgagattctcgtttttcggggagggttttggtactcacgtttactccaggtggttaaggccaggagtactggcacttcgccggtactcctggccaccattgcccatatttagggagttcttacttgattgcgtctaacgcagtagtgattttcttcgtgatttccttccccaggggagcagatccggctgcttcggcagctttctgctgtccatcggcggataccacgtagttgacccaggctttcaccagtttggcggtgttggcatctttgtactgcgggcaaaccgcgtagtaggaaaccagtaccaaggggtaggcctgggaatcatcgggggtgcggttgagtttcaacgccaggtcgttcttttctcgtccgtcctcaactttggcattttccacgatcttggcggctgcatctgcagagtattccacgaaaccatcacccgctttgagcgctgcagtcccgaaatcgccggcctgagaggcatcgatatagccgatcgcacccacagttttctttaggttatccactacgcccgcggttttatccccggattcgccgccagccaccggccaatcttttgatggcttatccggccaagcatccggggccgctgcgtgcaggtagtcggtgaagttctcggttgtacccgactggtcagcgcggtgtatggctacaatcttggagtcaggtagcttggcgtcagcattatcggcggcgatcgcggggtcattccatttggtgatttccccgcggaagatcttggcgatggtttctggcttcaggttcagtttcttgatgccatccaggttgaaggccaccgccactggggatacataaaccggcaggttgatcgctttggagtctttacaaaccgcagctgatttttcgacttcttcgctagtcagtgcctggtcagtaccggcaaaagacacgccaccctgtaggaaggtggtcacccctgccccggaacctgtggggtcataggttacttccacattcttagctacatccgcaaacccggctttccaagcctcaacggcacttttttgggaggacgcgcccgcgcccgctaacttgccggaaatatcaacagtttccgttttcttagagttatctgtatttccagtggcattatcggagccacaggcggccaagctagttgctgtcaaggcaagaccagcgataaccgctaaagatttaatgctcttgcgcatatctttccttcgattcttttagatttttcattgacacttgcaaagtaaacgaagaagttaacaccattctgacggcagcgttaatttttagttaacagtgtttcaaggtagaaaaattacccctgtaaaactgttttacctgtgctaatgaaaataactagccaatttttggagcaacccacaccagggtgtaatagggcaaagtgacattttggctggggtctaaagccaaatcgccccacagatacgatcgcagattactctgcatatgttgcttcccccgctcactagccttcagataggaagagcgggtcttggccagggcaaagagggcggcaactgggatagatattccccattggaacagtttcagctccggggtagcgaattgttttcctacttgcggcactcggtccgggtggtgcacatccccggaacgcatcacccgcgaaagccgctttacccaggggaaagacacattcatctggttgtagatgatcactaggcgtccgccgggtttcatcactgtggccgcggctgcgcaagccgcctccctatcgacccaatgccaggattgcgcaaaacaaagcgcatcgaaagtattgggtgcaaataagtcggcgacgtcctcggccttcccttcaaaaagagggacttgcgggagggattcgcggaacatttcccgcatggacgccgcgggctctagggcgctaacttttaccccctgcgctactaacgcccgggtaaacttcccgctaccagccccaacatctaaaacttgggggtttgctaatccggagagccccgcgcgaacagcagctggtagataggcgggccggtaacgttcataatcagttccggccaaagtgtaggggtttcctccgcgcgcagctccgccaacctgctgctcatcggtaatacttccaggaggcggacctagattaaccataggtatcgcggggaccgcgccctttaaccgaacgtggtccatgtttccaggagggtgcctgcgggcccagcacaatcaacctttttatcaccacagaaccggcatgatcctcaattaatcccattaactgcggaatcagattacgcagctcgcttgcccaacgggtagagtcgcagcgcaccaccacatccccatctttgattgattcgatttgcgcgtgttgagccacctggctaccaactatttgttcccaattggctttcagtttgcccacatccagcatttgcccgaagccaaagttatgtacatatttttcccaaaccgcgcttaacctgcgtggttccctccgtgaccatctgccgccgtggcctccacctgccagtcccggagagggctgtaactgtgctaatccgggaactcgatcgcgggcgtagctatcatttattcccttaatcttccccagcgagatttcctcggactctagggagtcagtgtctttagaagcggtggcagctagcccgtcccagttgcgtcgtccccgataacgtcgcagctcgccagccgacattctgattagccctttagaaaaggcgtgttcttgggcggcgcgcagcacccgctgagtgtaggtaggagtttcctctggctgctcgctcatgagggatcctgccggttatcttcgcggagagcttccccgctgacttcgccagatacggtcattggggtgacggtggttccttgggcggcgcgcagcacctcaaaaaaatgtgcttctatttcggggggtaaatctttacggctggtggcggtaatcaacacctgatcagcgcggttcatgaaatcgaggagggcggatctgcgggaaggatccagttccgcaaaaacgtcatccaagatcaggatgggagtttcccccacctgccgtaacagctcaaactgtcctaggcgtaaagcgagggcggcgctccaggtttctccgtgggaagcaaaccccttcaccggtaaggcatctaacatcaccgctaaatcatcgcggtgcgcacctgccaggttgaccccgcgaatcagttcttcctcgcggcgagccgcgaaagtttctcggagtgccgcctcgactgcctgcgggtcagccaaatcagcgggagccgcgaacgacggcacataggacaatcccaaggtttgggaggagttcgccagatgttcttctcctaaaaccagcaggtaagcctgcaccgcgtgaggggtaagcgcctgcaaagcccggactctacccgcaattaaacgcgctcccacctgggctaactgattattccaaacatcgagggtagatagttctaaagatagatctgccccgcggcgcttcttttttgccgcctgcttcaacagggcgccgcgctggcgcaaaatcttttgatgctgactgatagtgccggcctctaccggccacagttgcaccaataagtcatcgaggaaacgtctgcgagctgccggatcgccttgtaaaatatctaaatcttcgggagcgaacagcgtagtagcaatcagacctcgtacctgttttagaggtaccggggagcgcgctaggcgggcgcgattagccctcccggaacctatttccaggtctacttgcatttcgtgatcctggctgtgggctttcactcgaataactgccgcccctggcgcggtactctcagaactgctatctgcctgttcgccctcggtttctgaacctgctagcgccgttccctcgcgggcagcgagcgccgccgattggggggcgaagcgcaccagcgcgctgtctgcactggagcgatgggagtggaagttcgttaaatacccgattgcctccacaaaattggttttaccttgaccattggggccaaccaggatatttacccccggcgataaatgcacaacgcagtggtgaaaactgcggtaatcatccagggcaatatcggaaatatacatggctttgggcgctaccccgcctgactaggaagaatagcgaatcggcattagcagatacctaaagtccacagaatcgtcaccatctagttcttcctgtccggtaatcaccgccggcttggtggggtgagtaaaggacatccgcacatagtcggaatccaaagcgcctaaaccatccaggagatactgggagtcaaacacaatcatcattggctcatctgcaataaaggtgcaggtcatttcttcatgcgcctgcgcatcattgccctgcccggcctctaaagtaagggtgccatccgcgaaattcatgcggatctgggcgctgcggtcagtcaccaaagagacacgtttaattgcctgctcaagttcttcgcggcgaaccactgccttaataggcgcttctttggggaaaaggctggtcaccggaggataatctccttcggttagctgggaagtaatcttgcgtcctccggcttctagggcgataatcgccccaccctcggaagagttttctaaacctaaatgaatctctcctgcgccggaaagtgccttggccatttccgaaagaatccgtgactttaccagcgcatctgcggaaaaatcagtttctttaggttgccattccatttgccgtaccgccaggcgatagcggtcggtagccattaggctcaggtgggaatccgccagttccatccgcaccgtggccagcaaaggtagggcttcatcggaggaggcagcgcgggaaacctgggctactgcgcgcgcgaactcaaccgagtcgagttctccgatagcctcggggatttgcggcaaagccgggtaatcatccaggggcatcactgccaactggaaactggaggcgccgcaggaaatgctgactttacccccctccatctgcacagttaccggcttcttggggagctgtttgcagatattagccaccatttttccggaaaccaggacttcgccctctgattccacatcggcctcaaattggttccgagaggaaacttcatagtcgaagctggacaaggtgacgatcccggccttggcgctcatccacaccccgcctaataccgccactgctggacgtgccggcaaagtgcgggcggtccaactgattgcgtcctcgaaaacatcccgctcgactacgaacttcatgcgctgccccttttatcttcttgaccatggtgtatggcgcgaaatttgcaaaatccagccggtgaaaaccgggctgaataatttgttccagtctcccattatagggtttcgcaccccgattagcactaaagcgccaaaaactggggataacgcgccgattcttactttacgggacagattattcgcagctgcaaccggttttgagggttagcttctcaggtttaactggggtgcggccgcgatgagttcgcgagtatagtcctgctgcggatgagaaaacacctgctcaaccggaccttgctctacgattattccctctcgcatcactattacccgctggcaaaggtgacgcaccaccgccaggtcgtgactgacaaacagcaaagtcaagttttcccgctgggcaatctgcattatcagattcaaaacttgagcacgcactgaaacgtccagcgcggaaactgcttcatcagctattagcacgtcaggacgcgctgatagggcgcgggcgagggcgattcgttgccgctggcctcccgaaaactggtggggatatttatcggcgtcttcgctgcttaaaccgacttctgccagtacttcctctaggcgagcggggatatcagtaggcaccccctcgcgtccgcgaacccagggggaacgcagcggttcggtaataattttgcccacccgcatccgcggatccagggaactgagcggatcttgaaacacgatttgtacccgggcacgcaactcccctaactgcttttcttttaatccggtaatcgtgcgacccgcgaatttgatttctccgctagtaggacgggaaagagcacatagcatccgaattaaggtggattttccggaaccggattcgcctacgattcccagacgttccccggcagtgacttccaggcttactccagctaccgcgcgtacctctccggaggaacgcggatagattttcactaaatcttgggcgcggaaaatcggttgctcactcatcgctccccctaaagaaatcactcaggacgggcaggcgtgctcccggttttaccgccgcgatatcggcggttgccagcaggccgcgcgtatagggatgtttaggctgttccagcacttgccgcagggaaccgtgttccacgatttgcccccgatacatcaccagcagatagtcacatatctggttaaccaccgctaaatcgtggctgataaacagacaggcagaggcgcttcgagacagctctttatctaaaagccggagcaccttcgcctgcacagtaacgtccaaagcagtggtgggttcatcgcaaatcagcagttgcggggcatttatcagcgccattgccatcattactcgctgacgttgtcccccagacagctgatgaggaaaggcgttggcgctctgctccggctggggcaaacccacccgttccagcatttttatgacttcctggcgcttgtcactccgtccgcgttgatgcagcgctaaaacctccgccacctgtttaccgactcgcatcgtggggtcgagggcggtcatcggttcttgaaaaatcatcccgattttagcgcctcgcaaccgcgccatctgtctatctgccagcggcaataattcttttccgtcaagggaaaccgacccggagatttttgcgccctccccgagcagacccattagggcgagcgcggtcactgatttccccgaaccagattcaccaatcaaacccacccgcgcctggggcggaatctcgaaactgattcctttaactacctggcgtcctctaaaggaaacctgcaggttatctactattagtcccttcattgccgctcccgaagtcgcggatctagcacctcgcgcagcccgtcacctaaaaggttgaaccctaaaacagtcagagcaatccccagggcgggccacagcgccaactgcggatttaccagcagcgacttttgggcctcaaacagcatcaacccccaggtgggagtgtcgggacgggtacctaaccccaggtaggaaagggcggcctccgccaaaattgcgagggcgaaacttaccgaggcctgcacgatgattgtgggagcgatattgggtaacacgtgggtgaaggtggcgcgatagcggggagtacctgccgccctggccgccaccatatagtcctgcgacattacccccaaggtggctgcccggatattgcgggcaaatgcgggagtcgaggcgattccgatcgccaccatcgcggtccaggtggaaccggatccgcgcgccgccgccagcaaaatcgccaggagtagggcggggaaggcatagagaatatctagggagcgctcaataattctggccggccatcctccacgccccgcagcataaacacccagcggaaccccgattatggcgccgatactgacggaaactatccccaccagcagacagattccggctcccgaaagcatcctcgaaaacacgtcgcgtccaaaatcgtcagttccgaaaatatgggaggaagagggcgcacttaaacgctgctcgctaacttccgtagggtcaaatggcagatagaggaaagatattattcccatcagcacgatgagacttactagcgcgatcccgatccacagattgggctggcggcgtaacgatagttcccggtcggttttcatcgctccaccccctgccggattcgaggatccagtaactggtaaaccacgtctaccagcgcattaattaccaataccgccgcgaccagaatcatcactaccgcttgcactacggttaaatctcgctgcccaaccgcggcgatcaggtaggtgcccaaaccggggattgcaaatacttgctctacgacaatcgcccctaccagcagggtggaaagttgcagccccaagaccgtgattacctgtaaagatgcgtttctcaccccgtgacgcactagcgcccccggaaaacgccagccaatcgccctcgccgtgcggaaatagtcctgtttgattacttcgataaaagccgagcgggtgtagcgggtaagtaccgctccttgcactatcgctatcgaaagtgccggcaggaatagatagcgcgcccattccagcggatcatcctggaaagaaacgtaaccgtttgccggcaacacctgcagtttaaccgcaaaaactatggtcagcagcattccggcaaggaatgcggggatcgccatccctaactggctgaggacagacaccacgatcccgctcttacggttacggcgcaatgccccgagcatacccagggggattgccagcactaaagccaggatcatccccgcgaacaccagcgagaatgtggcctctaggcggtggggaagctgctgagagattgcctgtccggtaaatatcgaggtacccggatctaggcgtagcattccacccaaccagctgaaatagcgcaaaattagtggctgatccagtcccatagctgcccgcagttgcgccaccgaacccgggtcggcattcgcccctaaaatcacgccggtcacgtcccctggaagcaggtttatcagcaagaacaccactagcgaagccactaataggctcactattagggtggctacccgcttcaggatggcctgtgccggcgctttcatctcaactctggtagctaatagacgataggtcgaaggacagcccggttacattcgcggctaggccggaaatatctgccttggtcacaatcaggttgggcagcagccacaagaatccggcggcggcatcatcagagagtaccttcgcggcctccttcatatatttgacctggtcttccggggaagcctcatcggctttttgatacaaatcccggaactcctgcgaatcgtaatgccagtaataatcggtgttggtgaagcgagaaatatcgcgcggctccatatgggcaacaatagtcaggtcgtaattcgatttgaccattacctcatcaatccaacgcgccgggaactctaactgctcaatctctaaggtaatccccactttagaaagttggctcttaatatgggtggccgctcccgaggcatagggcaaagtaggaatccgcatcttgagggtgagtccctctccgtatcccgcttctgccaacagtttcttggctttttcccgatctaaaggataggcagaagacagatcttcataccagggatcagtcggcggcaccatcgatccaatcaacaagcctttacctgcccaaactgcgtcccgcaccgctttgcggtcaatggcatagttaatagcttggcgcactcgcttatctttgagggctgcttgctgctgattcatccccatcaccacttcgccattagtgtggccttccagcactttgaagcgggaatcatcgctgaacttatcgagtgcctggggggcagccaggttagaaataatatctagcgaaccagaaagcatcgcggtattcatcgcgttagggtcggagaaatagcggaaagtcgctcctttgaccttcggtttttcaccccaatacttctgattagtggctaactggatttcttccccctgtcgccactctttcaaggtataagggccagaacctgccggtttagtcgccaagtcacccttatcgagtgcctgcggatcataaataatcccggcagtcgaactcaggtaatacagccacgcattcgaggggtgcgacagctcaaactggactttgtttcccccgaggtctttcaccgccttcagggcttccatttcttgcttgcgggtagggctcacggttttatcagtcagcaaatagttgaaagatttggcgaccgccgccccatcaaccggggcacccgaagcaaacttcgcgtctttcaaagtaaaggtataggtcttgcgatcagcagaaacctggtactctttcgccagcagtggcaccagcttgcccttgccgtccacccgcagcaaagtttcatacacgttatagagcaacgcataggtaatcgccgccgcatcgttatgcgagggatctaaagtcgagggcgtagcatgcaccccgatagtcagcactcgctcggatttactatttgacgaattggtactggaacagccagctaacaccaaaccggcaacagccagcacagccaaaagacgcttacgcaaggatctcccctttatcggcgatgggtcatgatcgtttcaatcataacgcttgcccgccccgcccgaatttttcgctcactgccagctacgaggatggattgcgtaaacacagacgagggcgcgggggaagaagtttttcctcagaacaaaatcaaagaaactggactgttgagcgcgtgggggctaggtttttcctcccgcccaagaattcgaaaaacgtagcgacgttttccgaatccttatgcccaccgcacccactcggataaaacctagcccccgtgcgacatcaagtggttagcttcaaaatctaaggtgcccgcaagggtcgcggccggtaaaagatacgagaggggcttgaccggcgaagccggtcacggggtccccggagtgcttttaccgagccagacccgcagcgcatgctaaagcaaaatgtggataactgcagggattaaacgagttctggtacgcccgcaggggatcgaaccctggacccacggattaaaagtccgttgctctaccaactgagctacaggcgcctgccataaaggcacgttttattctacaaggacaacggccatttcccaacttagattttggttgcttacctcactaaagaacccgtaaagtagtattcaaatccctccattaaacggcgggaattcacttctaggaaagggttttcatgctcacgccaactacttttggaacccccatgtcgaaatccgctttgcgggtattattgctcggctcgggagagttaggtaaagaattggcgattgcattcactcgactaggggtggaagtccacgcagcggatcgctaccaaaacgccccggcacagcaggtggcgcactattcctacgttctagatatgaccgacggtaaacaggtagatttcctggtgaaaaaggtgcgcccgcattttattattccggaaattgaggctatagctaccgccactttggaagaaatcgcagcttccagccaggtgacggtaatccccactgctcacgccactcgtctcactatggatcgggaaggtatccgccgcctcgccgccgaggaactgggtatccccacttcccggtatgtgtttgcttccggggaggaggaaatgcgccaggcggtagacaaaatcgggctgccctgcatcgtaaaaccggtaatgtcctcttctggaaagggccagtccctgctgaaaaccccagcggatattgagcctgcctggcattacgctctggagggaggacgcggcgccagccagggacgagtaatcgtggaaggcctggtggatttcgactatgaaatcaccctattgacggtgcgttctctcgaccagcagacgggacagacagtcactagtttttgcgaacctataggtcacctgcaggtaaatggggattatcacgagtcttggcaaccgacacctatggaaagtggggtgctagaaaaagcgcaagctatttccgagaaagttaccaccgccctgggtgggcgcggcattttcggggtagaactgttcatttgcggagatgaagtcctcttttccgaggtgtcgccgcgtcctcatgacaccggcatggtgactatggcttctggttacctctccgagtttgagctccatgcccgcgctattttagggctaccggtcgatacccgcctgcgtactccggcggcctccgcggtgatttgcgctccgcttgcaagcgccgctccggtttatcgcggtttagcgtcagctcttgctattccggaagtagatttaaggctatttggtaaaccggattctcgccccggcaggcgaatgggagtggcgttggcgcgcggaaataacattgaccaggcgcgggaacgcgccaagaaggctgccggattaatcacggttcaagatgcctgataaaccgggaataatagtttttactttcgagcagtaaacctattttttcgctttctaccggttatcttggctatattcagcaataaataccaccgattttatttttaggttgccgcctttatcggttttgttttcgatattatttaacaagatatagaaatgcattattgccggcgttaaaataagaggcaaaagcaaacctcgaaaagggaaaggtaaaagtatggccagaaaaaccagaattgttctgattgatgatattaacggcgaacttggggatgaaaccattaagttcggtcttgacggcgttgattacgaaatcgatttaactaccgaaaatgccaagaagttccgtgaccttatggatccgtggattcaggcaggacgccgggtagggggacgccgcgtggccggcaccgatacccgcccggtttcggatgccgccaagattcgtgcctgggcacagaaacaaaatatgcaggtttccgaaaagggacgtatttccgcaaaggtgcgtgctgcctactatcacgctcattcaaaataaattcgggacttataccccgtgcaacctcactctcaaaatgaaagactaaagatatgacttacaaattgatactgctccgtcacgggcaaagcgaatggaatgctaaaaatcttttcaccgggtgggtagatgttccgctatccgaccagggccgcaaggaagccacccacggcggtgaactattaaagcaagaaaacatcttgccggatatcgtattcacctccctgctgcgcagggcgattatgaccgccaacctttctttggatgccgctgatcggcactggatcccagtgaagcgtaactggcgtctaaacgaacgccactacggcgctttgcagggcaaagacaagaaagctatccgcgaccagtacggcgatgaacagttcatgctctggcgccgttcctacagcactcctcccccagaaattgaattgggatctgagttttcccaagatgccgatccgcgttatgcgggagagccgattccgcgcaccgaatgcctggagcaggtgctagagcgcttgctgccttattgggaacaggaaatcgttccggaactcaagagtggcaagacggtgcttattgccgcacacggtaactcgttgcgcgcgattgtaaagcacctggatcagatcagtgacgaggatatttccggtctgaatattcctaccggggttcctttgtactacgagctggatgaggatctacagccggtcaagaagggcggaacctacctggatccggatgccgaagctaagattgcggcggtagccaaccagggcaagtaaccctgataagcagttttttctctgacagtccccgaggtcgccctcggggactttgtcatatctagccccggttccttcgggctttggggttaatccggctgcgccctcgcaaccggaaagaggtagattttcgggtctgagggcggggtgagagacaaaaagtgcgaattgacacaactttggcgtatctcactaccgcaggggcaaaaaatatggcagactgagatgtaggcgcaaccagcgctcgtgtcgcaggtgacacgtggggaagatatttcccgcagttacaaaaagacactccactcggatcgtcgggcacgtacctgcccgtggaggagatatataaatatgggaaaagttgtatttgattcggtatcccgaatctatccggggtcagatcacccggctgttgataaattgaatctggaaatcgaagatggagaattcctggttttggtgggtccttcgggctgcggcaaaactacttcgctacggatgttggctggtctagaggacattaactccggcaagatttacattggggataaagatgtaaccaatgtgcagcccaaagaccgcgatatcgcgatggttttccagaactatgcgctttatccgcacatgacggtgcgtcagaacatgggtttcgccctcaagatcgctaaggttccgcaagaggaaatcgataagcgggtcgagcaggccgccgaaactttggatttgactcagtatctggatcgtaaaccgaaggctctttctggtggtcagcgtcagcgcgtggctatgggtcgcgcgattgtgcgtaaacctcaggtgttcttgatggacgagccactgtcgaacttggatgcgaagctgcgggtacagacccgtacccagattgcccagttgcagcgtactttgggggtcaccaccttgtacgtgacccacgaccagaccgaggcgctcaccatgggcgatcggatcgcggtgattgcgggcggtatcttgcaacaggtgggcaccccgcgggaactctatgatcgccccgcgaatgctttcgtggctgccttcatcggttccccagctatgaacatcggtaccttcaaggtagagaatggttcggcagtgctgggcggagccaagattccgttggcgccgtctactgtggacgcgctgaagcccgaggataacggggaagtcattattggtttccgtcccgaggctctcgaagttcaagaggccggggtggatccggagcacaccattccgatcaaggtgacccacgttgaggaactgggctctgacggctatgtttacggcactttggatggttatgacgctaaggagcatcgcaccgatgatcgtccttgtttgaagcaggtaactatccgcgtgcctccgcattctgcgccccccgagggatcagtaatgccggtacggattaaagagggcgggcgtcatattttctcggcctctactcaagagcggctaccggaataaactaatcaaatagcaaccacaattgtgggggcaggcgtttcgcctgccccccattgctatggtgagtagcgcctggaggctcataccaagtcatgggctaatgcccgaacctttattcgctaggcgggtattggcatgttcccctgattaggtactaacccattacccaccgatgtagggctgataaccgaaatttattgcggggtcaatgcccgttttgaacattgaccccgcctggcgtgatttacgctagctaaacaggtgcttactagcgcgcatgcttcggctggcgccgccgagcaaccaggtaggctccggcacctgcgctgattacggatagccccaaaatggtggacaaatcagctgccccggtgttcccgaggccggaactggaagcgttagcttgctcacctgcatgtttacctgccgaggatgacccgggtgcgatgcagtcttggtagagcttctcgtaggtggctttcgcctgatccaactgagtggtagcctgctgcaaggcagcttcaaatggctgcaaggcagctttagcccgttgatattctggctctgcctgcttgacagtttccgcagcggcttccgtggctgctaccgcaggcggatattcctgatattttccaatcaccgcagcaatcgcgtcctgcgtggcttgactggcagttggagctgcgggcgcacggagcatggagattgccctaaatgcggcaggggcagctggggcagggttactgcctggctgctgcttaacccaggtgtctaggtcgggcacttcctgcgcggcattgttatctgcctcagcctgatctttagctgcctgggcactatcttttgttaccccagcgtcctgttttgctttatcagctttttcttttgccgcgttcgcatcagttacggctttatctgcggcttcggcattagccttggcctcatccgcagtcttttgcgcggcgtctttgtctgcgtaaaccttaccagccgcgtcgtttgccgtcttggcgtccgctgcttctttatcagctttgtctttagcttcctttgcctcagttgccttggtggtagcttcgtcagctttctgcttcgcttcgcttagcttggtttcggcgttggctgctgccgcatcggctttagctttttcggctttagcggtttcaagagcgcttagagctgcatcaatcgcttcttgagctgctttcagtttctcatcagcattatcgtggatagccaacgcttcttgatatttcttgttggcctcagccaaagcttttttattttcgtctactgatttttgcgcggcatcggcatcctgcttctttgcgtctacctcagtttgtgccttggtaactgcctgatcagctttagtcttttcatccttagcagtattcactacctcggttttttggctaaccacagtccgctgtttttcgatatccgcgacggatttagttagtgcgtcctgagccttagtagcatcagcattcgccttttctagctcctgttccgtttgtgccaacttgtcttggcaggctttacatttctgtgcttccgccttggcggtagctgttgcctgctgcaagttagtctctgcttctgtttgcgccgcttgcttttttgcaagcgtagcttgagctgcagttaacgcggtatgtgcgtctttagaaccattatccttggcatctctcaaagggctgtagtacttcagtaatcgttccctgtagtccgacacgctgtaggaagtttctgaggtggtagtggaagcttgctgaatgtctacaagtgggttagacccaaaaccgaaaccggcatatttaaaatttgcattcattacctgttcgtagtgaccggtagtattcacaatccagtatccgtactgaccttccttatgatcatcgtaagagaccgaaccaccattatcatcgtaaaattgcttttctgctctataccaaccgtcgaaggggtcttcgtgccaagctagaatctccccttgaccgacattgcccccccaattatgtgtatggtcgcgggtaattgcagaagcattggcgtttatttgagcaagcgccataagctcatctgttactcgtagggcatccatgggggcaaagttattgtccccggcttttctaagggcattgccttgatcgatataatcaagtgctttcagcatgttctcgagtgaagttgtatcaccatcagctcccatatgagtgtaattcataatcgggacttcttcgcctgtgaaattgccctccttatctttaattttgactttgtaggtagttttgaactgctccaatgccttctgcgaatttacactctcaaaaaagcctattgagccttttgcaatctgcgctttagcttcggctttggaggcttcgacagctgcttcggctttctttaccgcattccgagccgcttccactgcggcgtcagcttcttccttagccttcgtagctttctctacctctgctttggcagcgtcacacttcggctgctgctcatttaaggctttttgcgcgttatctttactggtttcggcatcggttttcgcttggacggcgttgttatagttttgctgcgcggaattttcatcatcctgcagctgcttcagcttatctttggcagcattcagggcttcttgagcgtttttgaccgcctgcgccttttctgccgcctcgttcttcgcggtatctagtttcgttttagcctcggacaatgcgtcattcgcagtcttttggtcgttgacggcattatcgtaatctttcttcgccgtatctaatttgttttgtgcgtcttgtagcgcattgtcgcttctaatagcctcttgcacggcctgaagtttctgatttgccttatctaacgcagtttgcttttcctgtacgtcattcgcagcgtctttagctttttgctccgcagcttgcttggcggtttcagcattcttagcatcctggtccgccttttcagcagccttggtggctgcgtctaggttagatttagcttccgcggctttttcttgtgcatcttttagtttcgctgcagcatcatcggcagcctgcttagcttcagctaccgcgtcagctccgggagcagcgtcctgcgcctgcttattcgcgttatctgcggcctcttgattcgtcttcgcgttattgaggttttcttcggctttctttgcccgttgctcagcctcagcaagagtctgctccgcttcctgcagcttctccgctgccgccgccagtgcttgtgctgcctggtcctgcagctgctggtgcgcagcggtggcatcatcccgtttctgttgctgggcagcttgtgccttccgcaaggtatcctgggcacccgcataagccgcgaggggcttggcaatctctggcttggcctgctcagtttctaaattcgcggcggcgtccgcggcttgctgctgggcgcgctgataatccttataggctttattgaccgccgaaacgtcaactccgacgcggcattgtgaaacagatcccggaatattcaacttgccctgtggtgctgcttgattaatcccgaatgccgcccccgccggagccaccagagcaataccggtgcctgctgcaatcgctaccttcgcaacctttttgcgtgccatgagattcccctctatatcctgttagtttcgctcgtatcatcaagccttaagttccctataatcttctcgtatttaaagacaaaagtccagtccaggggcattttgaagggatttatcccgaagtacggacagctgcaaaaaattaagaagtaaataacggaagaaaccacccggaaaaagacactcccgatagttctcagccccgaaaacaccaatcgcaaaccccaaaaccagagccaaaataacgggcattaacccaaaaaataatctggctcctagactgggaacgtcctaggagccagatttttctttttatttactgaagccaatcaaccaggtaacgactggattcttagattattttgaggagccgcgtcctcgtccctaaggacgcgaccctctttgggaccgttaggcatagaaaacgcaagttacccaacggagtatgcgggcagcttcagctcgtagagagaagctgacatgaacgaggtgagccagaactgcacggtgggttgaatctgcttacccttcatatcgggggtcaaagtcagagtgtcaccggttccaacctgcttaccgttttggtccttccagatcacatcggtgtagcgctcaactgaatcggagttaccctgcaagctaactttcgcgatcagcttgtcgccctggcgaactacctgatcctgatcgaatccgtagtattccagcttcagcggttcagaaatcgaggtgcccaccgggttggtgaccttcaagcggaagcgcaaggactcggcctcggcgcggttggcaatcggagccgaccgcagcagaccccacttgtcttcggtgcgagcaccgggagcgtagtccagatcgttcgcggttccgtagaagcggtgatcattgggaatccggaacttgtcctttacgtcctcccaagtcttaccggcatccttggagcgctgccactggtacttcatcccggtggagccctgcacggtgagcttagccggttcggcgtatccaccctgagctacccgaggagcggcattcaccttaatctggggagccatctcgctggaggagatcatgggatcgaacagcttcacggtgtaggtgtaggaggagcgagtcgcacccttaaccccggtaacgctaaccgtgtagtcacgcgatccatcggtacctaccggaagatccttgatcttcggcatcttgatcagcaaggtgttgtagaagttccaggtccccggaccctgcccgtcacggtcgttactaagaacggtggtgggaacttccgcaccgttcggaccagtcacccgcacctgtgctccagagaggtcaggacgctgcgacttgctttcaccacggaaagagatgctccagcgttccacatcgtcgcggtcatcgcggttagtggtcagcagctggtaggggaagtaaccggcagacggccaggtcatgacttccggcttgtaagcgctgtcattagccagctgcttgttattgaaatcaggggtggtgaccaggtgatcgccggttaccacaatcgcgttgtaaccattgacattcccgtaggaggaggtcgccagagtgggatccatcagggcgatgcggtgacccaggcggtcattggaaccaaccttggtcatagtagaagcgcccaagttagaaggatcaatgaagtaccacagaatctgttccgcaggagtttgcccggcgctatcagacaggttcgagatagcagctccctgctgtgctttttcagagaagcacttggagttttcttggatcgagtgagaaaggcgaccgttggcagccatattaagagcggcctgctgcgcataatcttgcagtccggaagtcatatccatcttgactgcctcggcaccgttgaggccgcggaagaagttaagagcccgacctaccgagttagcggtggtggggttggctacacccgcgcggcatttattatgatccgcaccgttgttggggctttcggggtagtcagtgtcggcaatatcgctaaggtaacgggtacgtaccgcttcccggttgttggtgtcaatggcattagcggtgactgcagtagaacctgcggcggaggtattggtgaaaaaggtagctgcatcggccaggtttacacctgccgcaaccacacctgcgaccagaacacctgcgaccaaagtcttggcgtgctctttccacgttttcatcgtagatcccgttccttgcgttttcctcttagtggaaaccaaatccttcgatttccgtgaacgttgcgatccttcgcttcgttcattaactattatcctccaaaacgaacacgatttaaagcgaaaatgttggaaaatgaaagttttacacctggtagggagaatttacgaatacttaccaaccataaagtagctttgaccagctatattagaatgttttcagatttttagagcgatagcagcagtctgggaataaaatgtgttttgcatcactggtaattttgaccatgtgaatgatttaatgtattgtttcatctacaaatagtaactaccagctagaataagtggaaagtggtagtgtttctcataaaaaatttaaaaaatgaaaatctaggaagcaacgccgctttttagctgagttttcactcaccgagcctgagttttcactcatgccaagaatccaacagagaaatgccgcaaacatttaactatcctcattttcaaatgatttttatgaaaacatacccatctgtgagtcatcgtcacactaaagccaaccagcaactcccccggggttaaactgttcgtgcctggaaaataactggaacttgaaatccgatttggctactccagaactttccgggatatatataaggtataaaggtcaatcgttaacccacgagaagaggcagttttgagcgctaagaaactggtaatagtggaatctccagccaaagcccgcacgattagcggatacctgggcgttgactaccaggtagaggcgtccgtgggacatatccgcgacctgccccaaccttccgcactgcccgagaaactaaaacagtcgggttacaaaaagttcgcagtcaacgtagatgatggcttccagccctactacgtggttaacccggataagaaaaaaactgtagcgggactgcgtaaagaccttgcccaggccgaagaactctacctcgccactgatgaagaccgcgagggcgaggcaatcgcgtggcaccttttggaagtgttaaaacccaaggttccggtcaagcggatggtgtttcatgaaatcactaaagaagcgattgaccgcgccctagaaaatacccgagatattgacactgacctggtgcaagcccaggaaacccggcggattctagatcgcctctacggatatgaggtgtccccgattctgtggcgcaaagttgctcgtcacctgtctgccggacgggtacagtcggtggccacccgcctggtggtgcagcgcgaacgggaacggatcgcgttcgtgcctgccaaatactttgacctaaacgccacctttagcgccgatgagcaggaattcgaggcgcgcgccctagaaatggatggggttcgtttcgctgtgggacgcgactttgatgatcgcggacagttaaaacgcaaagccacagttatggatcaggcgctgtgggaaaaactggcgcaggcgttgaccgaaaagcccagctgccaggtaacttccgtagaatccaagccctatacccgccgccccgctcccccctttactacctctaccctgcagcaagaggccgggcggaaactgcgaatgtcttcgcggcaaaccatggcgatagcccaatacctgtatgaaaacggctacatcacctatatgcgaaccgactccaccgcgctgtctagtcaggcgatttcggcggcgcgtcgccaggcaaagggcctgtatggcgcggatgctattcccgaaaagccccgcttttacgccaagaaagcgaaaggcgcacaagaggcacacgaagctatccgccctgcgggagataacttccgcaccccctcccaggtgaaaggggctctcagcgatcagcaggcggcgctttacgaactgatttggaaacgcaccctggcctcacagatgaatgatgcgcgcggaactaccgataccgtgcgggtgagcgcccaactggttttggaaggcgagacgcgcgaggtggtgttcactgcctccgggacggtgattaccttccggggttttttggctgcctatgaagaaggcaaagataaatcccgctacgccagcgccgatagttctaaggcactgccaaaacttagcgaaggacaaaaactggcgatcaccagtgtagatagggaaaaagcagagcacgtaaccagcccgcccccgcgttataccgaggcctccttggtgaaaacactagaagaaaagggagtagggcgtccctccacctatgcctccactattggggtgattattgaacgcggctatgtgcgccgcgccgggcaagccctagtgccttcgtggcaggcattttcggtggtcagactgctagaagaaaatctggcttccctggtggactacgactttaccgccactatggagggcgacctcgaccagattgctgccggtgagcgcgacgggaaagaacttcttacccacttttattttggaggcggcgagggcgatgctttctgggcacgcggcctgaaagaaaccgtggaaggtctgggcgagattgacgcccgcgccctaaactctatcgaggtgcaaccgggagtaaacgtgcgggtagggcgctatgggccttatctggaggatgccgaaggcaagcgagcctcagttcccgaagatttagcgcctgatgaattagatgccgaaaaagtaaaagaattgttcaccatttcggccgataccgggcgggagctgggcaaagatccagataacgggaacacgattttagtaaagaacgggcgctatgggccttactttactgaggtactgcccgaggacgcgcccaagggtactaaacctcgcacggcctccctgtttaagactatgtctcccgagtccgttgacttgagcgatgccttgaaactgctttcgctgccgcgagtagtgggcaaggatccggaaagcggaaccgagatcaccgcgcaaaatgggcgctatggaccttatttaaagaaggggtcggattcgcgctccctagaaacggaagaccagattttttccattactttggagcaggcgttagaaatttactcccagccgaagacccggcggggacgtaccgcgaagccgcccttaaaagaactgggaaccgatccggcctccggcaagccggtggtgattaaagatgggcgcttcggcccctatattaccgatggcaccaccaacgtgactgtgccgcgctctagcaccgtggaagagatagatgctgatcaggcctatactttgctggcggaaaaacgggcgaaaggaccggctaagaaacgcggaactcgcaaaaccaccaagaaaactaccgcgaagaaaactaccaagaagcgcgccagcactaagaaaactaccgctaaagccgcaaagaagactgcggcgaaaagtagctaggcgccagtggggcgccgccagccagtcgttgagagggttttagtaagtggtgcgctccgccttgcgcatagtgaacccgtgaccagtcttagagttccagcagtctaccccggtatattgctccactccacaggcgtaatcgccgttgtagtagacggagccgtagctagccggtgtttggggatcggttccattaccaggatcgcaatgttggtttactccgctatcagtcagctcaattgcccatatatcatcgcaaccctgttcccactgccgctgaccaatctggcaatatactgaatcgccatgcattaggcagccaatatttttgctaggcgtatagaatccgtgatcttcataaatcgcatctgcggggatcggcttgccggtttccacggcggtctcggtagcggtggtagtgctttgtgccgtcgtggcaacgttagtgctggtgtcactaccgctggcacctgccttacctccacgcgaagaaacaatccaggtgactaccacagtaaatgaaatcaaagctatcactagcagcacagttagaataataattccccagctgcgtttgggtttttggggatggggggcgctgactgccgctgggttcgcatagtagacaggatagggcgaatatgccggataattagcgggcggaggtataaccggttgctgctggggcatcggataggtgggcgcctctggttgcgttggcagcgaaactgtctctgccaagtgagtggcgccctcatccagagagggaatcgctgcttgtaggtcttccacaggaatacttcccaggcgagtggcatcctcgtcacctgctacctcaccgccttgtccgtcgggaacttcctgaacttcgcttctatcctggctttcaacagaggtttccgctagtttttctacctccgcatccttaggctcggttccgttttctgcgccttccgcgctcacttccgcctcagaacttatctcttcggtaaccggaatgtcctctgcgaggctttcgggtttttcttgcccggcgtcctcggcggggagtgggaggtcttcctcatctttgggagcgaacagactatgcgaagaagaggattcggtttccggagccgcttcttcgggttcttcctggctttccgaagctaactgtggcatttgcggcgccgaaaaatcccccgatccgtttggttctgccgaccctgatgctgcttgcgccagcgcggcctgtcctataagcccgcccctgcgcgcggccaccacggcttttacccggtcatctcccacgttttccagcaaatcaagcaggtctggataggcattcgagttggcagctacctcggcaaacacctcgggatgctgagctgcgatttcaaatagctgattcgcgtctgtttcagaggctagtgctcgctcacgcagctcttgcaaatcgtcattttcggtcatggttcgccttttgctaaagaaaatactgccctcattctagcgggcaagacgcagcggtggttaagagttctaaaataaccccggctaaaaatactactctcaaaaatttctgcaagcttcagcgagggcgcgggacgccaaaactggcagcgcctcaaactggcggctagcgcccttaggcaggccggaaagaaaagttttcaaaccctaactcgccgatttcctgagcccaggtttttacttggctatcccaacctttggcttgtgcctgaaactccgcggaagtacccagttcgcgcgcctgctgcagggcaaagttttttacgcctcgcgccgctaaatcctgcgccaactccactacttttccggggtgagatgggtaaacagttaatcgcacctcgtaggcgatgccgctggccaacacggcatctaagcaggcgaaagccttatctgcgccggctaccccggtgacttgccggtagtcggcgggcaaggctttaatatctagccccacccaatcgagtaagccggccgctaacatttcttgcaggcgcgaagggtaggctccggccgcgtgcaaccccacctggaaaccctgagccttcacccaacgagccgccgggattaccgctgcttgtgccagggcttccccgccggagaacaccactccgtcaagcagtccttttcggcgtcccagtaactcctctaactcggcaaacggtaccgcgccggggactttaaaatctaagatttcaaagttttggcagtaggcacagcgccaaggacacccctggcaaaacacactcgccacgatcttccccggccagtccaccgtggaaaacgggactagaccagcaatgttaagctgccttgcctgccccagcaggctcggctcaccgttagttgccgaaaaatcagacaccggctaactcttgcgagaaagtagtgcgctcggcatactcgctctgcttgccggtattgaaggaggtaaccggacggaagtatcccatcacccgcgtccacacttcacagggctgctcgtggttgccttcttgggcgcacttggggcaatcgaaatgttcgcccgacaagtacccatgtactgggcagatcgagaaggtgggagtaatcgtaatatagggcagcttgaagttcgcgagcgcccggtgtaccagggtcttgcaggattccgcggagttcatcgcctcccccatatagaggtgcaacacagttccaccagtatatttaccttgcagttccacctgttcttctagcgcttggaaagcgtcctgggtgtagcctaccggcagctgcgaagagttggtgtagtagggcgcatccgcggttcccgcctgaataatgccggggaagcgtttagcgtcctctttcgcaaagcgataagtggtgccttcggcaggggtggcctccaagttatagaggtgcccggtttcttcctgcagctgcaccatccgttcccggatgtgatctagcaggtcagcacacattttgtgcccgtcctcgccggtaatatcttgggcatcatcggtgaagttacgcaccatctcgttcattccgtttaccccaatagtggagaaatggttatcgagagtgcccaggtaacggcgggtataggggaaaagcccggaatccatatgccaggaaataacttcccgtttcttctctagggactggctggccaggtcgatcaggtgatccaactgtttggttagcccgtccagatcgcctttatagaggtagccgaggcgcgccatattgatggtcactacccccagggagccggtttgttccgccgaaccaaacagcccgttgcctcgttttagcagttcgcgcagatctagctgcaagcggcagcacatggagcgaatcatatggggatccagatcggagttcaggaagttctggaagtagggcagaccgtatttggcggtcatcgcaaataggcgctcggtgttgggggaatcccaatcgaagtcgggagtgatgttgtaggtggggatggggaaggtaaacacccgtccatcagcatccccggcggtcatcacttcgatgaacgcccggttaatcatctccatttcttcgtgcagatccccgtaggtgaagtccatcagttcatccccaatcagggggtgttcatctactaggtcatccgggcaagtccagtcgaaagtcaggttagtgaaggggcactggctgccccagcggctgggcacattcaggttgtaaataagttcctgcatgcactggtgaacctgctcgtagtccaggttgtctttgcgaataaacggcgccatataggtgtcgaaactagagaacgcttgggcgccggcccactcgttctgtaaagttcccaggaagttcacgatttgcccgcaggcagaggaaaaatggcgaggcggattggaagcaatcgcgccagtaactccgttaaaaccttcctgcaatagttgctttagggaccagccggcgcaataacctgcgaacatatccaagtcgtgaatgtggtagtcgccgtcgcggtgtgcctgcccgatttcgggagtgtaaatctcgttcagccaatagttggcaatcagtttgcccgaagagttaaggatcatgccccccagcgaatacccctggttcgcgttggcgtttacccgccaatcggctttcgatagatactcatttacggtctgacccggatcaaccaagtgcttcgtcttcgtttggggtgccattttcttcctctttcgcttccttcaaattcttcttttaatgtctacgggtttgtagccaacgctatcgactataggtaaaactggccgcaaagcctaatagacacaccagatatagtaggtttcccaaatctgaaccactagatattgtgtttttctgatttttctcatatttgctggcgaggacgaaaatggttactttacttgccagcgtgcacttgtttgaactgcgcaaatactttgggtcttaagtcctaaggggtaggaggggaagattttcgaggacgcatcccggcgcgggcaacctcaaaaataaaaatccagcaggcgccccctaaggcaaggacggttccggtcgccagcgaaagggcgagggggtgacgagatttagcgaggtggctgagatccatagtggccgtcccgaccgtgaaatagttgcctcctcgcgctaactggtagtagcagtaggcaaccagcactacccctaccagcgccatgatcgccgccagaaaagtgaagatgcgccctcgtcgcaaagctcgccgtccgcgctctccgcccagctctaagggagaaagcagtagggcgaacaccgaaactacgcagatggcggcaaatacatcagaaggacgatgccagcgcgccacaatcaccgctaaggccaccatccacagcaccaatgccgaaagataggtggccacttcccgccagcgatcggcggctaccatcaccagcgcaaccgccgctgcccctgccgtagtggtgtgaccggaggggaaagagttggtcatatagtaggtgattcccagcgcgggacggacaagcaccaaatgctttaacacctgggtggtgacggtggccgccagcaccatcaccagcattcgagcgccgagggcgaaacgccggcgcaccaacgccacgattactgccgccgcgattaggggcaccaaaataaataggtaccattctcgcagcagcacttgatcccagggcgcaaaggaatggttgaggtcagacagagcgaacatggcaagagtatcggttgcttgtccggcgcgggtgcgcacaaaaagcaggtagcaggccaccagcagtaacgcggcgaggagggcagccgaaaaacggcgcacgtaaccggcggttagactacttctcaccccgctgctcatgctttaaccttattttgtcacccctttggtttccacaaccactgggtattttggcgcgagtgttagcaataactattttcgctgggaaaggagcagctggtgaggttgcagaatctgctggcaagtttgcgtgccttcggcaccgatcagttgctttacgaaaaagtgcttccggcgcgccgcgctagttttgccccttggcccgattgggtgggagaagaattacgggcaggacttagcgccggcggtatagaccggctatgggaacatcaagctagctgcgccaatgctctttatagaggccaggatgtgattcttacttccggaaccggttccgggaaatctttggctgcttggctgagttttcttgcccggcgggctcaggaaaaaggtgctgatacttacctggaaggagcgcgacccactgtcctgtatctggcccccaccaaggctctggctcgcgaccaggcggcggctttgcaccgttggtctggactcgccggacttgatttgcaggttgcgccggtagatggcgatagccccggggaggttaagaagtgggcgcgggcgggtgctgacatcgtgctgaccaacccagattttttgcattttgctattttgcgcggtcacgaactttggcgaccgtttctgcgcggtctttcgctggtagttattgatgaggcgcactattaccggggggtcttgggagctaatgtggccttggttttgcgccgtctgcgccggcttgccgaccactatcatgcccagccggtctttgccctactttctgccactactgctaatcccgcagctcacgccgctaatcttttgggacaagggcgaaaccttaaagttatcgaccaagacacttccgggagcggggcgcatacagtattgatctggcgcccgccggtaatcgatgccagcgatcccgccagttgggatagccaaaatctgggggaagaaagcgaccccttattagggcaggcaaaagatttcgcggtaacaaatccccagctgagcgggggtgatgacaccgataaccccgaaggtaaacatgatgagggatcgcgctatcccgccatttgggagggcggtcgcctgctggcacagctagtaaataacggcgggcgcctgctgacctttgcgccctctcggcaaggggtggaaactatcgcccaggtcgcccgggatcagctaagtacccgcaatcccgcgttaatgtctcgggtggccgcctatcgtggtggttacctgccagaggaacgccgccagttagaaaaagacttgcgagagggcatcttgcaaggtctttcggcaacttccgccctagaactgggaatcgatatttccgggctggacgccaccattacctgttcgtggccgggaactcgcgccagtttctggcagcaagtaggtcgctccgggcgcgcggggcaagacggaatcggtatcttagtggtttccgataatcctttagatgatttcctggcgaaccatccagaagagatttttcgcccggtggaagcaatagttttcgataccgaaaacccgtttgtattggctccccaactgctgtgtgctgccgccgaacttcccttgaacagtgaagatgtttctttatttggggaagagagcgcccagatcatgtcggaacttcaccaacagggtttgctggtagaaagaccggcgggactttgtttcgatatcaccaaacctttttcaccctgggaagcggtgaaaattaggggcgatctaggtcaggtacagattattgaagccgaaagtgcgcaggtagtggggactgttgatagttctcgcgccgatagcgtgctgcacccggatgctatttatgtgcatcaaggccgcgtctggcaggtttcggctcgagatgaggacaccgcccaggtagttccgggccccaaaatgctacgcacccgcccaaacactgacaccagtatttcaattttgtctgaggaagcacccccggttacccctttgcagggagtcagttggcattacggcaggatcgaagtgcaaaccacggttacttcttttgatttattgcgtctgcccggtcatgtttatcaagctactttccagttggattgccccacccgcactctgcaaactaccggcacctggttcacgctagatgaatcgatagttaagcacttacagctaaacgaagaacagctgctgggagggggcttgcacgcagccgaacatgccctgatcggactgcttcccctggtagccacctgcgaccgctgggatctgggaggactatctttgactcagcatctacaaaccgggctacccacggtgttcatctatgacggaaccgccggcggagctggtttttcgcggcatggtttccgcgagttgcccacctggctggatttaacctaccggcaagtgaatgagtgcccctgtaaagagggttgcccccgctgcattcactcccccaaatgcgggaatggaaacgaaatgctttcaaaatccgcgggacgcgatcttttggaatttttgttggacacctttaagggcagaaaaactactggttagaaccctaacgctcactgaggctggggccggctcgcgaatgcgcctttgcccaccaattagcgggccctttcacgttgacctccactctcacgtcagaaacatgcaagctacaggcagctaaagaaacctggttttcgcgagccacttgctcagctacggcacacggagtgccttgccccccgtaaaagtaggtttgggcagcggctaaagccgcgaaatcggctccagtttgcgcccgtgccttcgcggctaaaaccccacctaacagtgcgacccccaccgctagcgccgccaataggcagatgaatcccaccgcccaaatcgtggctgagccttcctcggcctcggcgaatcctggttttctgaatccccgccaaagattcaccgctctatccccatcattagctctgtttctttgagggcgctggcgcggcaggtaaccgccggcaatactggtcccgccagttttttagtggcggtggctttaacccactgcccgctgcggtctaccttcaccgcgattgctcccctgccttgccaaggcgcaccaatacttgccccgcgcgctgctacccgtgccacgtcacagacttgcactttcgctgctccggccgcgccggcacccaaacccaaagctgccaccgccacgagagcgggcagggttagggcggtctcgacggtggcgtagcccccctgactttcccgccgcatttgccacagtcgacgcagccactgccaaaactgcgccgactgcggatgttccccgaatatttttttcactttaaatcgagagcgcctgttgaataattgcagttaaagcgctttttatcccccctcccttaatgactgccatcaataaaccggcaaatgcggccgccgctaaagttccgatcgcatattcggcggtagtcattccgtcctcctcggtttttagccgcgtaatcgcctgccgagtctgtgcccaaaccagtgcgcgcaacgccaaatttttcatcccttcccctttcctgacccccagacccacttcagcctgcggtgataccagcattccgcgcgagatcccactccggcaatgtccgcataaatccctgtgtaaagaccgcgattatcacctcctggggacttgtaggcgataatgggcgcatgagtgagcaagtaacccaatctgataaagaactattcgcccaggcaagaaaagcgattcccggaggagttaactctccggtgcgcgcctatggatccgtgggcggaactccccactttattaaagaggctttcggcgcctatgtacgcgatgaagaagacaacactttcgtggatttggtttgttcctggggaccggcactactgggacattcctgcccccaggtggtgcgcgcagttcaagaaaccgccatcaaaggcctgtcttttggtgcccctacagtgagtgaaactaaactggcgcaggcgattaccgcccggatgccttcttgcgaacaggtgcgcatggtttctaccggcaccgaagccactatgaccgcgattcgcttggcgcggggagtaaccggacgtgacctaatcatcaagtttgccggctgctatcacggtcactccgatggactgttagccgccgctggttccggagtcgccacccaggggctgcctggttccgcgggggtaaccgccgcggtggccgcggaaaccatcgtgctcccctataacgactttgacgccctcaccgaaaccttcgagcgcaaaggggaacaaatcgcggcagtcatttgcgaatcctgccccgccaatatgggagtcgtacccccactgcccggttttaaccagcacattcgcgcgctcaccagtaagtatggggcgttgatgattaccgacgaagtgctgaccggtttccgggtaggaccctcgggatattgggggctgcaaaatgactattggatcgacctgcccgcaaagctcccggatttttccagcgaggacgagcaggccagctggcaggccagccagctagaaaaaatggagttcgttcccgacatcttcactttcgggaaagtaatcggaggaggcatgccgctggccgctctgggcggatcccgagaaattatggagcagctttctcccctgggtccggtttaccaagccggaaccctttcgggtaatcccttagctactgctgctggtctgaaaactttggagctggccgatcacacggtctatgcccgcactactgcggttgctgacgccctaatcggagctatcgagcacgaggccgaggaagcggaggtacctctgaaagttaaccgggcaggcagtttattctcggtcttctttggggaaggccccgcagaaaacggggtaaccaatttcgaacaggcaaacgcgcaagaaaccttccgttaccgggcgttcttccatgcgatggaggaacaaaatatcgccctaccgccctccggatttgaggcctggtttgtgtcttccgctcacgatgaccgggcagtaggacggatcttggaggcgctcccctctgcgatgcgcgccgccgccgaggctgaggctgatgatagttaagttaaaattgtttatttatcgattctaattgataactcattaccccagggttttgagttaaataataaaaaactcgattaaaactctatcgttaaactttaatgttgtgatacactattaagcgtattagtaggttgggtagggaagttccgattgactatgggcattctgcgcaagatcagcagttttgctgccactgctttagtggcagcagcgccgctgtgcattggcttctgcgctgctcctttcgccgttgccgctccttccgacacaccaaccaccagcacttccactaccaacccagctggtcagtcgcaaaatctcaatgactggtcaaaagctaattgccctggtggagccgagtttgttaatgacgctaatcaaaataccccgatttatttggggtacgcgaacgggaacacctatctgggctataccgacgcaaaaatgaacagcaatgcgggaacggggaagaactttattgatccccgatccgatgcaaagtaccaggaaaagttcggtacctgcgtgcgggtagctgctgatcacagtgggcaggccattgcacacgtcttttacggaaccttattcaaggcagatgaatctgccctcgctgcctccggttttagcaaggaaactgagaccgttttccaggtgaccaaagtaaaatcatgggaaccgggaacaacggtagaatcacgggctaccgagtctagtgacaactaccaagaaatgccctactccgtttccaatgggcaatccgatagcggtttcaataatcttttaactgctgatgagacctcgattgacctgcgctttagccagtctggtttttacaccatctacctaaaagccatcactaccgaccccaacaaccccgataagtcctaccaggccgaaatggcctacacccttatcgtcggtaaagaagcctcagttcccaaagatctccaagatgttgtcgatgggaaagacccgggaggatcagacaatccccccactcccaatccgggagaaactactcctggtacccctacaccgggacctggggacgagggcggaggaacccaaccgggaactgaccccactcccaatcccggggacattactcctgatactcccacgccaggtcatagcgataatggggggaacacccaacccggaaccattcccaccccaaagccagaggtaagtcctgacccacggacgccaaatcatggaaccgctaacggaaatactcagcctggaactaatcccgaccgcaaacccgcagtaggatctactacttccgggcataacccgggacaagcttcctcttcccgcctacaagcaaattcgcggcttgtcggcactaactctgcccggctcggcggctccctaacccgcacgcagctaccccggccgctggcaggtgccttccccacccttcctgactcggccagctctgcagatgccgggaactcagcggggaataacgcccactctgcgacgcctaatccggactccgccactgcaaacggttccgactccggttcccaggccgataacgaaaattccttgaagttccaggcagctaatacttccactaaacaagccgcccaacagtggattcgttcctcctccctagcggtattttcggtaggtctggcagttgccggtcttaccggtatcggtttacttgcctactcgcggctacacccgtagatgaaaaaaccttggcgcgcccgtttgcgcgactaccgtttaaaacgggaaaaagatcaacctcttgatgaagccatctatatgtcagtggttactggccgtctcgaacctctgctgcgcgccctcgcgatctatccggtttatagcagcgggcaagtcatacataccgatgattcccagtttttagtcgcctactctacccgcctgcgagcagacaatacctcccctgtgaccccggcgctcttaactgaacatttggatgccaccagcgcagaacctgcccctttgggagcaatcctgaatccgggtggaaagttcgaaattaccctggaggcgcataatcttccacgcctacgcgccctggtttccaatcttccttgcgaggacgcacttaccccgattgcctcagaatccctggaagtaaccccgcctacggaagaacataagcagctgctaaccccgctaacgcaggagtttggggtgcctgccgggcaaagcctgcgcgtcctgactgccgagtttcacggttttaaaccggggtcgtggccggtagtttttttgattgatactgccggagtacctcaggagattcccgccggcctgggcgagcagcttaaccgcgattttccccaggtgatagtggtagatccggcgattgctgattggcggcgcgacctattttggcactaccgggagttgctggtctaaaagcctgtcagctgtctgcctgacgccaggcaaaagcgagttacctaggttttatttccctaatcgcggccaagaactgatcattttctgcgcggctaccgatagttacccgcacgccctcgggaaaaccgcgggtttgtaccccctgcgagagcgctgcctcctggatttgcgcgcctacctgcccgccgaaccaaataaagttgccacccgcttcgggaatattccaaccatcgtggcgcagcacagctaatactcgctctcgctcctcacagacctcagctacctgctggcgaagggcttcctctgcctccaatgccgccaacgcacaggcttcagatactgctgatagcccaaagggagttgctactttgcggatcgctgccgccacctgggggctagttaaaccgtaaccgcagcgcagcccggccaaagcgtaggctttagaaaaagtgcgcagcaccaaaaggttaggaaaatccgcgagcaaagccgctccatcgacatgcccggcagacgtatcgaactcaaaataggcttcatccaagactgccaagactgtttggggcaaagcccttaaaaattcgcgaacctgcatcgccgagagggaagggccggtggggttattgggactgcagagaataaccgccgcggtttcttcatctaccgcccccatgattgcgttcaaatcgtgaccaccctggctatttagcggaatctgccgggaggaggcaccggtaatccccaccaatatcgggtaggcctcgaaggaacgccaagggtagaccacgttattgcctgcctgcgccaccgcggtcagcgcattggcgagtacctgaatcgatcccggccccactaccacctggttttgatccaacccaaagcgggcagccagtttttccaccagggcactaccaattgcactcggatagcggttagcggtggctaatgcccgctcacctgcctcaataaccgttgaagcgggtgggaaaggtagctcgttactggagagtttaactacttttccggcgtcccctttgcctgcaacataagcgggaagcccggcgagtgcctggcgaaatctaaccttagtcataagctaagtttgctcctttaagccatttgctgcccgtttgtttcaaaatggcgtggctggcaagtacgtacaccggctgcgctcggattttaggggttcattttcccagcttcgagccggtaaccactcctttatttagcgtgccataataggacttatgcaaaccctgcttgataactgttttgatttcgcacaaaccgacactgctttggggcccttagatggacgctaccgctcccacgtagcagccctgaccaactacctgtccgaacccgcccttaaccgtgcccggcttttagtagaggtagagtggctgattttcctggccgaaaaccgggtacttgcgggggtcgagccttttaatgaggacgagaaacgctacctgcgctccctgatagaaaacttcggcgaggccgaagtggcagagctgaaacaaatcgaagcggaaaccaaacacgacgtgaaagcagtcgagtatttcttgcaagcacggctgcgccgcgccggagatgttttaggggaaactgccctacctcgctacctggccgccgtacatattttttgtacttccgaagacatcaacaacttggcctacgggattggcatcaggggagccgtagaaaaggtgtggctgcctaaagctaaggatctggtcaagcagctaggtgaactcgctgcccaggcagctgaggtgccgatgctggcgcacactcacggccaacccgctaccccggttactctcggtaaagaaatggcggtgttcgcctatcggttgagccggcagattagccggattgaaaataccgaatatttaggcaagatcaatggggctaccggaacttgggccgcacataaagtggcggtacccggggctaactggccgcagctcgcgaaatcatttgtggaacatttggggttaacctggaatccgcttactacccagattgaatctcacgattggcaaagtgagctttatagcgacctggctcgggcaaacctgattatgcataacctggctactgactgctggagctacatctcgatggcctacttccaccaaaacttggcggcgcaaggctcgactggttcctccactatgccgcacaaggtcaaccccatccgctttgaaaatgcagaagccaacctggagatttcttgtgcattgctggaaactttggcgcaaaccctggtgacttcccgactgcagcgtgaccttaccgattcttctacccaacgcaatattggggtggctatcgggcactccctgctcgccctctacaacctttcaggcggccttagggggctagatgttgccgatcaagtgatggcgcgcgaccttgaccggaactgggaggtgcttggagaggcagtgcaacaggtgatgcgggtagaaggcttggcgggcactcccgggatggataacccctatgagcgactgaaagagctcacccgagatagcaaagttgatgaggcagccatgagagacttcgtactttcattagggctttctgaggacgcgcagacccggctggcggcgctcaccccccaaacctatattggttatgcccccgaactggctaccggaaagctacttgaaaactaatacttaccaggtggtaagtagagtatctagcggaataattccgagaatctaggaatttttaggcaaatagtagatacatttaccaaggttaaagccttatgtgagctatctcacttagattagattattttcagctggcaatttagtgaccatgcggtaagattattagtggtaccaaatgaatggagcgttcccaataacggctccgcgatagatgagggattgaacaatgagacttaagaacttcgccaagaccctggtatctggggtgtgcgcaacggccttgattcccgccggtctcttagcggtcgcagcagccggtaacctgcaaggtgaatcgccagctcgcgaagtaaatgtatccacctcagtggcgaacactcccaagtttttaagcggttgcatcgactcaagtcagctgggctatgaaaatgtggagattcgcaacctccccgctggcaaagactggttccttactgtttctgactctgaccagagccccttccccagccgtgacagctaccggaatcccaatggtggcggctatatgtacattttcgattccagcgctgacaccaacgatcgctacattaaagaagcggttgcagaatccggttccgggttggcaggcacctataagttcaactcttcggtcaagaacacttacggctgggtttttgtccagctagaggacgagctatacggagctttgagagttaacgccggttgcgattacgacttcgccacggtgttggacaacaatgcttttgacaagtacctacagatcaagaagatggtggttaacccgcaggcagtacggcaaaccgtaaatccgcacctagacctgcaccagttccgggcgccggcagatggcgactttaaggtactagatacccgcccggcacctcccacgccgactgatccggacactgagccggctcatccggatgttcccgaggttccaacagctccgacagttgaacgccaggcgccaactcttgacgcttcctctaagaagcccgaaccgcgcgctgcggaacaacccggctcgcagactactaagcaaagcactaacagccaagctaaaccgcaaccggctccggtgcgtaccgtagttgagtatcgggaaaacacccgtaccgtaactgttcccggtccggttcgtttccgggaagctccgactaatacttcatcctccaataacgcaagtggagcgaataatccttctacttccgcgaacaactccgctaaaccggctcaagaggcgtcggatggcgcgaaggaagcaactggcaatgggaccgccagtcaagttcagggagtagaagcacccaaggcagcgccttcggcgcccgccgcggctcgagctgccaatcccagtgtggttgaccgcatgggtgggctcggcacgattgccgcaatcgcggttcttgggttgattggcgcaggtggcgccattgccctaaccaggtcgttaatgaacggttaaggccactgggaactggccttagcagttctctggttaggtacggggcaggagattccctcaatctcctgccccgtcttaaattttgtggatttcataaacagctgaactcattgcaaactgcaagctaccgactagaattcaagcagaacacatcaaaataccagaagaggatactatggggtttttttcagcaaagcaatccaataagaaagccactgatcgcactatcgatatttcggtcaccggcatgacctgcaataaatgcgtagagcacataagtgaagccctggagagtctagataaggtgaagcaggtgtcagtattgctgcgcaccgaagaacccagccaggtgaccatcctgactgactacgagatcgaagatcaggttatcctcgacaccgttaaggacgccggatacgaagttgtcgccattgaacgcgaccaataactcgcctacttcgtagcttttaagccagccccgcgcaagcaaacgctagctattgcccggctgtcgtctccctatttgcctgcagtttttttcttcgagcgcgccttgaaatagctgaataccataggtaccaccgagatggctacgatcgcgagggcaattatttctacgttattggccactgccgggatatcccccagcagcactcccgcgatcataaacaccccgatccacagagccgcgccgagcatattccagatcaagaaagtacggtaattttgcttgccaatcccggcaatgatcggcacgaatgttcgaacaaagggaacgaaacgggctaaaactagcgccaccccaccgtaacggcggaaaaactcctcggatttatgcatattttcggttgataaatagcgggcgtcatctttaaatagccgccgtccgtatttgcgacccagccaatagcccaccaggtttccgcaaatagcagcagtaaacaggactaggaaagtcagccattccggtactcccggtatccggttgtgcaaaattcccaaggcgaaaatcatggagtcacccggaagtaccgggaacagcaccccagattcgataaaaacgattagggcgacagcagccaccatccagccaccaagctgcgctaaaagcgtgttaagcaaaaggttgggatcggtgaggtaatctagcaccccggtagcagccacgaaccctaacatctgccctcctgaaataaaataatcaactgtcttcatcctagacgagggcgctagtgccctggcaagcaaaaacccgccctgggcgtaaggtcacatctaagttaattgcatagaatcaaggcatgagtatttcgggagatactgccagtcctcagcaggatcagcacctcaccgaaatagttgacgccaaaaactcgcgtttgcgtcgcatagatgacttggcacgcgccggactttacctggcagccatcatcctggtggtgctgatggctatctatgcccacgccaccacgcaggcggttgcccaagatttaactaaagtttttatcaacaccactttggcgcagattctgctactgcccctctccatgctgcagaatctatttatcctggtagccccggtggcgttactgattatgctggcgctgcgggggcaatggttgcgcaccttccaagcagcttttaccgcggttgtggggggaatggtcgctttaggggcttccgccttgatttcggcgctcccctacgtgttttcaaacgccttaaaagtctgggcagtgggcggctcgatagtggcgatttccattccctttaccgcggtagtggcaatgatgactatggccggggaacgccgacgtgaccagctcgtacggatactatgggcaataacttgggcaatcttagccctggcagtcctccaaggccggatgaccttaccttcggcgctaatcaccgtactattaggtactttcaccgggtgcataggacgctacctatggggggttcgtaactatcgccctagcggatcttccttgatttgggctttaacccgagtggggattactccccggcgaatcttgcgtctagacccacctaccgagggggatctgctttgcgttgaacaagtaacttttactaccgaaactggctccctgctgccacttggggaaatgaaacgggaaagtctgccccgagacccagttttagagctcgccacttttgccggtcaagatctaaaatccgagggggaaaccgccggatctgctgaccgggtttatagcgtgatctctgaggattcccgccgctaccggatggtggctaccgatggagattcccgcctctccacctggatcacgggaatctggaataacctacggttgcgctctttttcgaagtcaactgccagcaccgtgagacaaaacggggaatacaccgcgctaatgggggcgatgaccacccgggcgcaagtgagaacgcgtccctaccacggcctcgcccactctggcaccacgatgctcaatattttcgaggacgacattgccctaagaccgtttagttctctaggttctgcagatatttctgatgcacaaatcacttccgcctggcgccagctgctacacgctcatcaaggagggctcgcccaccgcaatatcagtgccgaaaatctttgtttaggatccgatggatttccctattttcttaactggtcacagggggaagtcgcggcctcccgaatgtcaatcctcattgaccaggtacaacttctagtgttaaccagcctgttagtgggggaagatcgggcagtcaaagccatgcggcaggtgctgcccgcttctcaaatagaagctatggtgccggtactgcaaactttggcattgccagattcaacccgacagcaggtacgaaaaacctccctacttgccaacttgcggcaagaactattagtcagcagccacaccgacccagcaactgttccccgtgcccaattgcgcaggttctcttggtcttcgctaatcttcactgcgctgggagtagcggcagtcttagtagtattaggttcgctgaactttaaagaaatctacgccacgattattaccgctaacggctggtggatcgggggtggaatattttttgccatcgctatgagcagcgggcaagcgctatccctgcaggcagtaaccccaaatcgcctaggttatcgggaactatttttactgcaaatcgccggttcggtcacctctctggtggtgccggcaggcttgggggtaggagccctaaacctgcggtatttaaccaagaaaaatatgaccagcgcccttgccttagctaccgtctccctaatgcagctcttccaattcgtgattaccgtggcgctactggcgataatggtgatgttcaccggcacttctatgaacgtgcggttaccgtcttcgactatggtgagcgcagtcctagtgattgtcgctttgctagtaaccgccttcgccctccccaaagtgcgtaaatggatttgggaaaaaatcgaaccttccttctatcaggtatggccgcgcctaatctggattacctctagtcctaggcgtatgttcttgactgctctgggatgcctgctacaaaccagcctgcagctagccgccttttattgcgcggtggcagctttcggctaccacctgccgattgccattattacggttactttcctggtgtccaacactttaggctccctgattcccaccccgggagggctgggacccgtagaggccgctctgactgccgggctgcaggtagcgggggtaccaggcgcgattgcgctgtccggagccttgttgtatcgcttactgaccttctggatgcgcgcgcccctgggatggttagcgatgcgctatttgcaacggcgtgacgtgctctaactaactggcttccctccgcttttctcccttaggctagaagcaaagagaggaataggttaatgagtcaaccccctgccacagagcaacccaagaaaaagccggcagccattattgtcttaagtttactggcggtttccttcttagtgctggtattttttatcgcctactatctaggttcgagcaaaactgacgctaccagcaccaacggcaccgatgcgtcctcgcttagtagccaaggcgcacaaagtgaccaacagttacctcaaggggttaacctgattagcgacgaacagggcaagcagcttattaagtctttttatcgctccaataaggacgatgcccgggcgattggtaaccccaaggctccggtaaccatgattcagttttcagacttttcttgccccatgtgttaccaatatgaatccacggtgtttccccagctaaaaccctatatagataacgggaccctgcggatcgagttcaacaacttggcgattttcgcccgggattaccattcggatctggcgggagccgcttcaattgcggccgctaaacagggcaagttctgggagttcttgattgccgccaccaatttggctggtcaacaaggcaatggtcatattacctgggatcaggagctggtcactcaagtggctaaatccagcggagttagcgacctcgcacgcttcaatcaagatctaaactctccggaagctgcgaaaatagtggaggaagaaagcgcgcgtgctcactcagccggccttggtggcaccccggcatttttcatcaataactattacattaccggggctctacctgcggaaagttttctacaaacgattgaaattgctttgaaggacgcgaagtaatctcccatgactattaactttacgattgcttacctgggaggcctggttaccttcctagctccctgcggagctttcttactaccggcctttttcgcttgcgcttttgaggagcgcggccgtctcctacagcgaatcctagtgttcctggtcgggctaatcattgccttggttcccctaggttttgccgctggaggcctcgggggttggctactcgcccactctcgcctagttactctcatagccgggggggtaattttagctttaggtctagcccaagtattcgctctccccttacctaaactgcctctacctcgggctttaggtggcgcgacccgtcctagtatcgccgggattctccttttcggaatttcctacggcctcgctggatctggatgtaccggtccgatcttaggggcagtgctttcggcggccacccttaccggttccagtgttcgcggcggcatcctaatgttttggtatgcgctaggaatgttcacccccgttgccctactttccctaatctggggttcgctcactgcccgccaacagcgcctatttcacccgcgtcctctccggtttttaggacgccaaaccacctggggctcgctactggccggcttagtgtttgtggcggtaggagtatttttactaattaccggcggcaccaacgctaactctttacttgacccctcccagcaggtatcgctagaaacccgcatttcccaggtagccggtgccctccccgactttctgttgcccctactgctagtggttctagtggcattctttgccacccttacctggtatttgcgcagccaacgcggaaaacaccatcaagaagaacttgattctgcaggcggcaagtagagaatttttactttaattttgctcttttgatggtcacggctttggtagcctcgcttcttcgtgggaaaatggctattaatctagcaaaggagaagctaatgagcgcgcaagaaaaaggaacccatctggatttatggcaggattcctatgctgcgcgagctcataacctgcgtgaatccgaaattcgcgccctcttttcagtggtttctcgcccggaagtggtttctttagcaggcgggatgcccaatattcatgatctgccgctagcaaaactggccaatagtgcccagcaactggtgcttgaacacggcgaacaggcgatgcaatatggcggcggtcaaggctgggcgccgctacgcgaagctataaccgaagtaatggccgaagaagggatccacgccaaccccgataaggtggtagttaccaccggctctcaacaagcattagacctggtcacacagctttttattgagccgggagacgtgatactagccgagtcgccctcctatgtgggagcgctcggggtgttcaatgcctaccaagcggatgtgcgccatattgctcttgatgatcaggggttgatcccctccgagttcgcccgcaccgttgagcaggcgcgcgcggaaggcaaacgcataaagtacctgtacactatccccaattttcacaaccctgctggggtatcgatgtcgatttcgcgacgcaaagaattggtggatttgtgccgcaaatatggggtgctgattttagaagataacccctatggtcttctaggttttgagggacaaactatgacccccctggtggaacttgcccctgacctggtagtttaccttggttctttttctaaaatcttcgctccgggctttcggattggttgggcgtacgcgcccccagcggtcagggacaaactggtggtggcctccgagtctgcgattttatcgccctccatggtgggtcaaatggcaatccacgcctacctgcgcgactatgattggcgcggacagattgactcctaccggcaaatgtatcgaggacgccgcgacgccatgctcgaggcactggccgattacctgccggaatgtcactggacagttcccgaaggtggtttctacacttggctgactttgcccgaaggactagattccaaagctatgctcacccgggcagttagcgaattggtggcttatactcccggcaccgccttttatgcctctaatgaaggtcgccaaaatatccgcctagcgttttgctatcccccagaagatgagattcgtgagggcgtgcgccgtttagccaaagtggtgcatcgggaaatggggctagttaaattatttgcttcccagcagaaaggtaagagccatgactgaaagtaaaagcttgaaggttgcgattattaccggaggacagcttcacgagcgggaagtttcgctgcgttcggcaaatagagtggccacccaactgcgccaatatggtcaccagctgcagactttggaactcgaccgagatctacttagttccctaagtgacttctcccccgatgtagtttggccaataattcacggacgcgaaggcgaggacggctccctacaggatttattagagttaagcggcttggcttatgtgggtaccggacccaagggctgtcggatttcgctttcaaaaccggtagcaaaatcggtggtagaaaagaacggactgccgactccacattcagtagccctcccgcaaatgctatttcggcaggtgggggcagatactttgctgagcgaggtttctcggcgcttgggatatcccttaatggttaagccttctaggggtggctcggcaatgggaatcacctatgtggaaaatgaacaagcgctgcgcactgcgatggtaaacgccttcgcctatgacgatgaagttttaattgaacgctttgtccctgggcgagaaatctcggtttctatcgtagaagaagccggagctccccgcgccctacctcctgtagaaatccgcactgacgtgggcagatacgactttgatgctcgctatttaaccggacgcaccgaatatttcgtgcccgcgcctttagaagctgagctagatgaccgcatccgttccttggctttagactgtcaccgggttctggagttagaagatttttcccgcatcgacatgattgtggataaggctggtaacccatggtttattgacgcaaatgtagttcccggtatgaccgatacttctctttggcccttagcggcgcacactgatttaggtttcggtgaactaattgaggtgattactcgggcggcagccgcccgcggcgcccgcgcctaaccaagtttttgcatcaattaatttattcctacgaatcacaaggtttcgagtttagctagatcctggtttattaaccttgttgattccgcagaactgactggtttttccccgctaactaacgttcgccactagccttttctaacagcttcgtaattcgcgctaaatcttcttcatcagcgtattcaataactaacttgctagttttcttgcctggtttaataactacccgggtatcgagaatatcggtccagcgtgcctgcgctatctcttgactagcagaaagattaggcttgctccgcgaagaggtcgcccgtcgccgcaccgatccccgcacatttcccagtgccacaatttcttcagtagaacgcaccgaaagaccttcagcgataatccgatccgctaaatattcttgatcccccggatcacttaccgccaataaggcgcgggcgtgcccagccgaaagcactccggcagcaactttcggttgtacgctggctggcaaccggagaagtcgtagcgcattagttatagccggccgcgacttagacactcgccgagaaagttcctgctgagtacaaccaaaatcctccatcaactgctgataggcagcagcttcttctaaaggattaagttcaactcgatgcaagttttcgatcaacgcatccaacaacatcttgttatcgctggtttcacgcacaatcgcgggaatttgtttcaccttcgccaactggcaggctcttagccgccgttcccccatgatcaattcataggcgttcttgtcagtgggatcggtgcgcaccacaatcggttgcaatagtccaacttctttaatcgaagctgccagttctgcaatttcgtcctcatcaaaagtttggcgaggttgtgagcggttgggatttattttcttaactgcaatcagttccagttttgcgcccggcactggcaccaaagatgtttcacgtgaaacatcctcagtgacacctactttttgtggtttctccgaaactgccgacttccgttggcgaccgtttgaactgtctccctttttagttgtctcctttggtcggctgttacgcaatgtttcacgtgaaacaattttacgaggctctaaaagttctttagcagatccgcctttgggggagtgcccatggccaccgaaaaagatatccgcaggacgtgagtcagtatctgctgctacttctgcgggtttagtttctgctggctccgtgggaatcagtgcagataatccgcgccctaaatgtttctttcgcgtcattacgatttctcctcgcgactaactaactcatatgcggcatctaaataacattttgcacctttagaagccggttggtaagtcaaaattgattcttcatgcgagggggcctccgccaaggccacgttacggggaataattgtttccataactatgttgccgtagtaggcgcgcacctcttctaaaacccctttacctagcaaagtgttggtggtaaccatagtgggcaaaataccggtaaatctcaggtcaggattaagccttattaccaacatgtcgatagtttttgtcagctgcgtaagcccttccaaagctaaatattctgcttgcaaagggaccagcacttcctgcgcggccaccagtgcattaaccgtcataatccccagggaagggggagaatcaataaagatatagtcgaagtgttctccgctatttaatagttggtgtactgcatcggcgagaatttgttgaaaattagttcgctcgttcaactctagttcgataccggccatattcatggaggccggcactacccacagatttgggattttttcgttttgaaccagtgcatcgcgcagggccgcgccctcggtcatcacctcatagagggaaagctgatcttcagcgaggtgacgaaatcccagagaggaagaagcgtttccctgctggtcagcatcgattaccaaaacttttaagccacccaaagccagcgctgccgccaggtttaccaccgtagtagtcttgccgacgccgcctttttgatttgctaccgcaatcacccgaggcttttcaggcgcgggcaaggtatcggttccgctgggattaagggaacgtctagtcgcgccgctatcggttccgctatccgcttgctccaccatgtctgcatctgctaatcgatgcttgctcattatgcctccaaaaagagtagtaagcagcttgccacttaaccgcgttttgttgccatgattattcgagttatcgaatcatccattagggagggtacttcctctatatgcgccgactctagcttagctgccatcagttcttcctgagcttcagccagttcttggggagctttctcgcctttgatggccagcatcctgcctccgggagccaccagtttgcctgagatgcgcactaatttcttgagactggctaccgctcgggaggtaaccgccgaaaacttttgatcggggggtagatcttggctgcgggaacgcaatacttcgacgttttttagttgcagctcttgttttacttcctctagccatttactgcgccgcgcaagcggttcaatcaagtaaaactgcaggtcaggacgcattatagctaatactactcccggtaatcctgccccggaacccacatcggctaccgtcacatttctgcccagcggcaagaacttttcggctgccgcgcagtttagaagatgccgcggccacagccgcggaagttcgcgtggacctagtagtccccgcaactcaccctggtctgccagcatctgtgcatagcgattcatattcgcaaaagaggaaccaaaaaactcttttacgctctcactcggtaacgcaacctcagaatctactggcgacatagctaaacccaacccaataaaacaaaccagctagctgataaaagccagcaggtcggtataactattcttcttctgattccggaccggcttcagtcggataaataactactgcccggttcggagcttggccttgcgacccagaatatacgccttcatcagccgctacgtcgtgacacactttgcgctcaaaaggattcatgggctccaggcgaaccggttccccgctggtttttgccttggtaatcgcctcttcggcaatagcccgcaactcttgtttacgttcctcacggtagcccacaatatccagcatcaagcgagaatgttctcccgtcttttgggaaactgccaggcgggttaaatcctgtaatgcttctagaacctcgccctctttccctaccagacgcttcagatccgaaacatcttggggatccgccaccacatctacactggcacgatcgtgttccacatcgatttctaaatctccgcccaaatctgcaatatcaagcagttcttctaaatagtcagcggcgatatcgccctcttcttctaaagctgttacccggtctggggcttcctcttcgctcatgattgttattcctctcttaactacctgcaatgatcctatcggttcttccgccgatttttaccgtcattattcttcctgcgcgcctggcggcgtttcgctttttcttgctcgctaagcccgccgccctgacgacgccgtttagcttgcgcatcccgctgcgcccgggtgagccgtttaggttgtgcctgggcattgcgcaccccgggcttcatcccttcctgttgttcttcggcctttttttgcaaggccgacatcatccgggactgtttcgccggtttccgcggtttttcttctagctccaggtcctgcgctttcttatgcaaccgatcctgggtttctttatggagagccacgccttcacgcagtacctcaccattttccacctcttcaaagggatcctcattacccttacgatcagctttgacttctagccgcaaacctttattcacgtcctcgccgcttagccccatttcggaaagcttctggttgtattccttcagcgtttcctctttaaatttatcgtatttaacctggtgacgctgcatttgggcgtcatgagcgggggagccgggagtaggcagatagcgcataacaaaaatctgttgaacaaaactaaccaccatcgtcactaccaggtaaaccagcaccccgatctgcacaataaaaccgaaccaagcggtcatcaggggcatcacataaaccatcatcttcatcatccgcatttgctgcggattggaagtgttcatattgcgccgcatattgatgaactgctggaagaacatcaatccgccgtagagcagcaccgaaacaataatcagtgttttagtcgcggtagggttggaggcggtgttagtgaaagtatccgaaagataaaccccaaatactgtagatttatccatttccgcggccagggtggaatcaaatcccccaatatgggctccaggatgcttggcaatcaaaggcatttgccaaagcacccggtacaaagccgccaaaattggtaattgaatcagcagcgggaaacaggatgccatcgggttgacaccatattctttatacagagccatggtttcctgactcatctgctgcttagagacctggtcgttgcgccccttatatttttcttgaatcgctttcatctggggttgaatagcgctcattccccgggtggattttatctgtttaataaacaggggaattattagtagccgcacaaaaatcgtgagtaccacaattgatagcacccaggtagcaccgggaccttccggcaagcccagcaaagttaagcccttgtggatccctaccagtacccaggcagtcacccacttgaaggggtataaaacggtgtcataccaaccacccgaagtgggttgggtagatgccgcaagcatctgcgcacttagcaacatggatttgctcctttactgttttaccgggctcgggagggctgcattatctatcttcgcccaatgttcttggagttcgcttaaagtcatctggtgatagggcgcgcttttccactgtcccttttgtggagggtaatccactcctccatctgaaagcggattacagcgcagaatccgccaaccggcgagcagcccgcctttaagggcgccgtgtatctgcagcgcggagagcgcatagctactgcagctgggataatacttacagcgcggcgggaataggggagaaatacggcgctgataaaaaccgacaagggatatcagcgcccgcttcgcgatttttcctctcactttttccccttttgttttaccttactcaaggcttggtctaaagccgctcctagctgcaggtaggaagcattttttgatttccccagagcgcgaatcacggttaggcttccgctgcctagattttctaggcgactagcactaagtgcccgaaggcgccgtttaactcggttacgatcaactgccctaggcaagaaccttttaggtacaacgaaaccgaccagcggcgccgcagtgccaaactggtcgggtaggtggtgcaccaccattagttgatttccgacgcttattccccgccgaaacactaaggaaaaatcggctgattttttcaggcgattggcctggggcaacatgctctaagccgagagttccttgcgtcctttattccggcgattagcaataatggctcgccctgcgcgggtacgcatcctcgccctaaagccgtgtttcttggctcggcgacggttattcggctgaaaagtccgctttgtcactttatttctcctaaatgttcttcgcttaccggaatgaatagctccggtctcttaggttccaggtttgtaacctgggattagacaacataagcaagcctacgcatagcacttagccaggtcaaatagttattcagtggttatgaccactattttttcccccgcttaataaacctgtggaacttacaaaaattacaaagatgtaagatgttaattatctattttaaaaactttctgtttttaatgagtttttgcacgctataccctttttacccccttaaactacaactgtgtaagttatccacaatcttttccccaggttggggataacctatttttgtcctagaatcatcactaaccccaaagttggggaaattcctcacactggttttagagattttggagaaatcg

(The sequence listing continues in the following parts.)

1. A method of providing a cancer prognosis in a patient based on the presence of one or more bacteria in a biological sample from the patient, comprising:
(a) detecting the presence of one or more bacteria selected from the genera Fenollaria, Ezakiella, Peptoniphilus, Porphyromonas, Anaerococcus and Fusobacterium in a biological sample from the patient,
(b) providing a prognosis for the patient, wherein the patient has a poor prognosis if one or more of the bacteria are present in the biological sample.

2. The method according to claim 1 wherein the one or more bacteria is selected from the genera Fenollaria, Peptoniphilus, Porphyromonas, Anaerococcus and Fusobacterium in a biological sample from the patient,

3. The method according to claim 1 or 2 comprising detecting the presence of bacteria from each of the genera Fenollaria, Peptoniphilus, Porphyromonas, Anaerococcus and Fusobacterium in a biological sample from the patient,

4. The method according to any one of claims 1 to 3, wherein the one or more bacteria are selected from: Fenollaria sporofastidiosus, Peptoniphilus rachelemmaiella, Peptoniphilus harei, Peptoniphilus coxii, Anaerococcus prevotii, Anaerococcus lactolyticus, Porphyromonas bobii, Porphyromonas asaccharolytica, Porphyromonas bennonis and Fusobacterium nucleatum.

5. The method according to any one of claims 1 to 4, wherein one or more of the bacteria are selected from: Fenollaria sporofastidiosus, Peptoniphilus rachelemmaiella, Peptoniphilus harei, Anaerococcus prevotii, Porphyromonas bobii, Porphyromonas asaccharolytica and Fusobacterium nucleatum.

6. The method according to any one of claims 1 to 5, wherein one or more of the bacteria are selected from: Fenollaria sporofastidiosus (identified by ECACC accession number 21092201 or DSMZ accession number DSM 34056), Peptoniphilus rachelemmaiella (identified by ECACC accession number 21092202 or DSMZ accession number DSM 34055) and Porphyromonas bobii (identified by ECACC accession number 21092204 or DSMZ accession number DSM 34063).

7. The method according to any one of claims 1 to 6, wherein a poor prognosis is associated with an increased risk of elevated rates of metastases.

8. The method according to any one of claims 1 to 7, wherein the biological sample is a urine sample, a semen sample, a prostatic exudate sample, or any sample containing macromolecules or cells originating in the prostate, a whole blood sample, a serum sample, saliva, or a biopsy (such as a prostate tissue sample or a tumour sample).

9. The method according to any one of claims 1 to 8 wherein the biological sample is a urine sample.

10. The method according to any one of claims 1 to 9, wherein the method is used to determine whether a patient should be biopsied.

11. The method according to any one of claims 1 to 10, wherein the biological sample is processed prior to determining the presence of the one or more bacteria in the biological sample.

12. The method according to any one of claims 1 to 11, wherein the presence of the one or more bacteria is determined using quantitative polymerase chain reaction (qPCR) or a probe-based detection assay (such as NanoString®).

13. The method according to claim 12, wherein the presence of the one or more bacteria is determined using quantitative polymerase chain reaction (qPCR) or a probe-based detection assay (such as NanoString®) using one or more primers comprising a nucleotide sequence selected from the list SEQ ID NO:1, SEQ ID NO:2, SEQ ID NO:3, SEQ ID NO:4, SEQ ID NO:5, SEQ ID NO:6, SEQ ID NO:7, SEQ ID NO:8, SEQ ID NO:9, SEQ ID NO:10, SEQ ID NO:11, SEQ ID NO:12, SEQ ID NO:13, SEQ ID NO:14, SEQ ID NO:15, SEQ ID NO:16, SEQ ID NO:17, SEQ ID NO:18, SEQ ID NO:19 and SEQ ID NO:20.

14. A method of detecting the presence of one or more bacteria selected from the genera Fenollaria, Peptoniphilus, Porphyromonas, Anaerococcus and Fusobacterium in a biological sample from the patient.

15. The method according to claim 14, wherein the one or more bacteria are selected from: Fenollaria sporofastidiosus, Peptoniphilus rachelemmaiella, Peptoniphilus harei, Peptoniphilus coxii, Anaerococcus prevotii, Anaerococcus lactolyticus, Porphyromonas bobii, Porphyromonas asaccharolytica, Porphyromonas bennonis and Fusobacterium nucleatum.

16. The method according to claim 14 or claim 15, wherein one or more of the bacteria are selected from: Fenollaria sporofastidiosus, Peptoniphilus rachelemmaiella, Peptoniphilus harei, Anaerococcus prevotii, Porphyromonas bobii, Porphyromonas asaccharolytica and Fusobacterium nucleatum.

17. The method according to any one of claims 14 to 16, wherein one or more of the bacteria are selected from: Fenollaria sporofastidiosus (identified by ECACC accession number 21092201 or DSMZ accession number DSM 34056), Peptoniphilus rachelemmaiella (identified by ECACC accession number 21092202 or DSMZ accession number DSM 34055) and Porphyromonas bobii (identified by ECACC accession number 21092204 or DSMZ accession number DSM 34063).

18. The method according to any one of claims 14 to 17, wherein the biological sample is a urine sample, a semen sample, a prostatic exudate sample, or any sample containing macromolecules or cells originating in the prostate, a whole blood sample, a serum sample, saliva, or a biopsy (such as a prostate tissue sample or a tumour sample).

19. The method according to any one of claims 14 to 18 wherein the biological sample is a urine sample.

20. The method according to any one of claims 14 to 19, wherein the presence of the one or more bacteria is determined using quantitative polymerase chain reaction (qPCR) or a probe-based detection assay (such as NanoString®).

21. The method according to any one of claims 14 to 20, wherein the presence of the one or more bacteria is determined using quantitative polymerase chain reaction (qPCR) or a probe-based detection assay (such as NanoString®) using one or more primers comprising a nucleotide sequence selected from the list SEQ ID NO:1, SEQ ID NO:2, SEQ ID NO:3, SEQ ID NO:4, SEQ ID NO:5, SEQ ID NO:6, SEQ ID NO:7, SEQ ID NO:8, SEQ ID NO:9, SEQ ID NO:10, SEQ ID NO:11, SEQ ID NO:12, SEQ ID NO:13, SEQ ID NO:14, SEQ ID NO:15, SEQ ID NO:16, SEQ ID NO:17, SEQ ID NO:18, SEQ ID NO:19 and SEQ ID NO:20.

22. The method according to any preceding claim wherein the sample is from a human.

23. A method of treating a cancer in a patient in need thereof, comprising providing a prognosis of a patient's cancer using a method as defined in any one of claims 1 to 12, and administering to the patient a therapy for treating cancer.

24. The method according to any one of claims 1 to 12 and 22Error!Reference source not found., wherein the cancer is prostate cancer.

25. The method according to any one of claims 22 to 23, wherein the therapy for cancer comprises surgery, brachytherapy, active surveillance, chemotherapy, hormone therapy, immunotherapy and/or radiotherapy.

26. A cell culture comprising bacteria Varibaculum prostatecancerukia identified by ECACC deposit number 21092203 or DSMZ accession number DSM 34057.

27. A cell culture comprising bacteria Fenollaria sporofastidiosus identified by ECACC deposit number 21092201 or DSMZ accession number DSM 34056.

28. A cell culture comprising bacteria Peptoniphilus rachelemmaiella identified by ECACC deposit number 21092202 or DSMZ accession number DSM 34055.

29. A cell culture comprising bacteria Porphyromonas bobii identified by ECACC deposit number 21092204 or DSMZ accession number DSM 34063.

30. Use of a cell culture according to any one of claims 26 to 29 in providing a prognosis of cancer in a patient.
